(19) United States
(12) Patent Application Publication
(10) Pub. No.: US 2011/0047634 A1
(43) Pub. Date: Feb. 24, 2011

(54) METHODS AND COMPOSITIONS FOR THE DIAGNOSIS AND TREATMENT OF ACUTE LYMPHOBLASTIC LEUKEMIA

(75) Inventors: James Downing, Memphis, TN (US); Charles Mullighan, Memphis, TN (US)

Correspondence Address: ALSTON AND BIRD LLP;ST. JUDE CHILDREN'S RESEARCH HOSPITAL, BANK OF AMERICA PLAZA, 101 SOUTH TRYON STREET, SUITE 4000, CHARLOTTE, NC, 28280-4000, US

(73) Assignee: St. Jude Children's Research Hospital

(21) Appl. No.: 12/866,511

(22) PCT Filed: Feb. 4, 2009
(86) PCT No.: PCT/US09/33035

§ 371 Date: Nov. 12, 2010

Related U.S. Application Data
(60) Provisional application No. 61/030,679, filed on Feb. 22, 2008.

(51) Int. Cl. A01K 67/00; C07H 21/04; C07K 14/47; C12Q 1/68; C07H 21/00; C40B 30/04; G01N 33/68; G01N 33/566

(52) U.S. Cl. 800/13; 536/23.5; 530/350; 435/6; 536/24.31; 506/9; 436/86; 435/7.1; 435/7.21

(57) ABSTRACT

Compositions and methods for the identification, prognosis, classification, diagnosis, and treatment of leukemia or a genetic predisposition to leukemia are provided. The present invention is based on the discovery of a novel intragenic deletion in the v-ets erythroblastosis virus E26 oncogene homolog (ERG) allele which is shown herein to be associated with a novel subtype of B-progenitor acute lymphoblastic leukemia (ALL). In one embodiment, the intragenic deletion in ERG results in the expression of C-terminal domain deletion forms of the ERG polypeptide which lacks the DNA-binding PNT domain and CAE domain of the ERG polypeptide and have dominant negative ERG activity. In other embodiments, the intragenic deletions results in a loss of expression of the native ERG polypeptide. Such nucleotide sequences and amino acid sequences of ERG find use in methods and compositions useful in the identification and/or the prognosis and/or predisposition and/or treatment of ALL, more particularly, the novel subtype of B-progenitor AL.

### FIELD OF THE INVENTION

[0001] The present invention relates generally to the detection and treatment of a sub-type of acute lymphoblastic leukemia.

### BACKGROUND OF THE INVENTION

[0002] The leukemias comprise multiple different groups or types including, but not limited the following: acute myeloid (AML), acute lymphatic (ALL), chronic myeloid (CML) and chronic lymphatic leukemia (CLL). Within these groups, several subcategories can be identified further using a panel of standard techniques. These different subcategories of leukemia are associated with varying clinical outcome and therefore are the basis for different treatment strategies.

[0003] The development of new, specific drugs and treatment approaches requires the identification of specific subtypes that may benefit from a distinct therapeutic protocol and, thus, can improve outcome of distinct subsets of leukemia. As it is mandatory for these patients suffering from these specific leukemia subtypes to be identified as fast as possible so that the best therapy can be applied, diagnostics today must accomplish sub-classification with maximal precision. Thus, methods and compositions are needed in the art to provide means for additional leukemia diagnostics and treatment.

### SUMMARY OF THE INVENTION

[0004] Compositions and methods for the identification, prognosis, classification, diagnosis, and treatment of leukemia or a genetic predisposition to leukemia are provided. The present invention is based on the discovery of novel focal intragenic deletions of the v-ets erythroblastosis virus E26 oncogene homolog (ERG) allele which is shown herein to be associated with a novel subtype of B-progenitor acute lymphoblastic leukemia (ALL). Non-limiting examples of these intragenic deletions of ERG result in either the loss or a decrease in ERG expression or the expression of C-terminal domain deleted forms of the ERG polypeptide. Non-limiting examples of C-terminal domain deleted forms of ERG can lack the DNA-binding PNT domain and the CAE domain of the ERG polypeptide but continue to retain the ETS domain and the transactivation (TA) domain of ERG. In specific embodiments, such C-terminal domain deleted ERG polypeptides act as dominant negative forms of the normal [or wild-type] ERG polypeptide. Such nucleotide sequences and amino acid sequences of ERG find use, for example, as biomarkers for use in methods for detecting the intragenic deletions of the ERG allele which is associated with ALL, more specifically, a novel subtype of B-progenitor ALL, and thereby identifying the novel subtype of B-progenitor ALL. Further provided are methods for identifying agents that bind to and/or inhibit or decrease the activity of the C-terminal domain deleted ERG polypeptides. In addition, the C-terminal domain deleted ERG and polypeptides and polynucleotides encoding the same can serve as molecular targets for drugs useful in treating ALL, more specifically, treating a novel subtype of B-progenitor ALL. Accordingly, the present invention encompasses methods and compositions useful in the identification and/or the prognosis and/or predisposition and/or treatment of ALL, more specifically, a novel subtype of B-progenitor ALL.

### DESCRIPTION OF THE FIGURES

[0005] FIG. 1 provides a schematic illustration of the structure of the normal or wildtype ERG gene, along with the alternatively spliced ERG1 and ERG2 transcript isoforms transcribed from the wild type ERG gene. The various protein domains of the ERG polypeptide are also illustrated, as non-limiting examples of ERG intragenic deletions disclosed herein. The designation “E3” and “I#” represents the exon and intron numbers based on the genomic nomenclature. A blank box indicates that the sequence is absent.

[0006] FIG. 2 provides the amino acid alignment of the ERG polypeptide encoded by the ERG1 transcript (SEQ ID NO: 15); the C-terminal domain deleted ERG polypeptides (ERG_I1_D6-10_distal_ORF, SEQ ID NO: 16 and ERG_I1_D6-12_distal_ORF, SEQ ID NO:17); and the fusion protein predicted to be expressed from a chromosomal translocation of TMPRSS2:ERG (denoted as TMP_ERGa_ERG1_CDS, SEQ ID NO: 18).

[0007] FIG. 3 annotates the PNT domain, the CAE1 domain, the CD domain, ETS domain, and the TA domain of TMPRSS2:ERG (SEQ ID NO:18).

[0008] FIG. 4 annotates the ETS domain and the TA domain of ERG_I1_D6-10_distal_ORF_predicted protein (SEQ ID NO:16).

[0009] FIG. 5 annotates the ETS domain and the TA domain of ERG_I2_D6-12_distal_ORF_predicted protein (SEQ ID NO:20).

[0010] FIG. 6 annotates the PNT domain, the CAE1 domain, the CAE2 domain, CD domain, ETS domain, and the TA domain of ERG_isoform1_protein (SEQ ID NO:15).

[0011] FIGS. 7A and B provides the mRNA sequence of ERG_I1_D6-12 (SEQ ID NO:5). Exon boundaries are denoted.

[0012] FIG. 8 provides the mRNA sequence of ERG_I1_D6-13 (SEQ ID NO: 6). Exon boundaries are denoted.

[0013] FIG. 9 provides the mRNA sequence of ERG_I1_D6-10 (SEQ ID NO:4). Exon boundaries are denoted.

[0014] FIG. 10 provides a schematic illustrating non-limiting 5′ and 3′ genomic break points occurring in the ERG gene. SEQ ID NOS; 23-32 are shown therein.

[0015] FIG. 11 provides the annotated sequence of the native ERG isoform 1 mRNA.

[0016] FIG. 12 provides the annotated sequence of the native ERG isoform 2 mRNA.

### DETAILED DESCRIPTION OF THE INVENTION

[0017] The present inventions now will be described more fully hereinafter with reference to the accompanying drawings, in which some, but not all embodiments of the inventions are shown. Indeed, these inventions may be embodied in many different forms and should not be construed as limited to the embodiments set forth herein; rather, these embodiments are provided so that this disclosure will satisfy applicable legal requirements. Like numbers refer to like elements throughout.

[0018] Many modifications and other embodiments of the inventions set forth herein will come to mind to one skilled in the art to which these inventions pertain having the benefit of the teachings presented in the foregoing descriptions and the associated drawings. Therefore, it is to be understood that the inventions are not to be limited to the specific embodiments disclosed and that modifications and other embodiments are intended to be included within the scope of the appended claims. Although specific terms are employed herein, they are used in a generic and descriptive sense only and not for purposes of limitation.

### I. Polynucleotide and Polypeptides

[0019] Compositions of the invention include ERG polynucleotides and polypeptides and variants and fragments thereof that are associated with acute lymphoblastic leukemia (ALL). In specific embodiments, such polynucleotides and polypeptides are associated with a subtype of B-progenitor ALL, more specifically, a novel subtype of B-progenitor ALL. As used herein, “a novel subtype of B-progenitor ALL” refers to a subtype of B-progenitor ALL characterized by a unique gene expression profile, aberrant expression of CD2, and the absence of the recurring cytogenetic abnormalities. See, for example, Yeoh et al. (2002) Cancer Cell 1:133, herein incorporated by reference in its entirety. Various methods and compositions that allow for the detection of such abnormalities in ERG are provided. Compositions of the invention include ERG polynucleotides and variants and fragments thereof that can be used to detect intragenic deletions in the ERG gene that are associated with ALL, more particularly, with a novel subtype of B-progenitor ALL.

[0020] An “ERG” polypeptide or “v-ets erythroblastosis virus E26 oncogene homolog” polypeptide refers to a transcription factor that is a member of the ETS family of transcription factors. The ERG polypeptide comprises a series of characterized domains including an ETS domain, a transactivation domain, CAE domain(s), a CD domain, and a DNA-binding PNT domain. The ETS domain is a conserved region that mediates binding to ETS motifs containing the core recognition sequence 5′-GGA(A/T)-3′ and/or engages in protein-protein interactions. Methods are known in the art to assay for the activity of the ETS domain. See, for example, Zou et al. (2005) Mol Cell Biol 25:6235-6246, herein incorporated by reference. The transactivation domain mediates DNA binding, homodimerization, heterodimerization and/or transactivation. Methods are known for assaying for the activity of the transactivation domain. See, for example, Carrere et al. (1998) Oncogene 16:3261-3268, herein incorporated by reference. The CAE (Central Alternative Exons) domain is structurally and functionally characterized. See, for example, Carrere et al. (1998) Oncogene 16:3261-3268. Methods are known in the art to assay for the activity of the CAE domain. See, for example, Carrere et al. (1998) Oncogene 3261-3268. The CD domain has a negative influence on transactivating activity. See, for example, Carrere et al. (1998) Oncogene 16:3261-3268. Methods are known in the art to assay for the activity of the CD domain. See, for example, Carrere et al. (1998) Oncogene 16:3261-3268. The DNA-binding PNT domain has DNA-binding and homodimerization activity. Methods are known in the art to assay for the activity of the DNA-binding PNT domain. See, for example, Carrere et al. (1998) Oncogene 3261-3268, herein incorporated by reference.

[0021] The human genomic sequence of ERG is set forth in SEQ ID NO:1. The various exons/introns of the ERG genomic sequence are further illustrated in the sequence listing as shown in SEQ ID NO:1. Alternative splicing allows for the production of two ERG mRNA isoforms: ERG1 (shown in SEQ ID NO: 2) and ERG2 (shown in SEQ ID NO: 3). The polypeptide encoded by the ERG1 isoform is shown in SEQ ID NO:15. It will be appreciated by those skilled in the art that DNA sequence polymorphisms may exist within a population (e.g., the human population). Such genetic polymorphisms in a polynucleotide comprising the ERG gene as set forth in SEQ ID NO:1 may exist among individuals within a population due to natural allelic variation. The term ERG gene encompasses such natural variations.

[0022] The term “gene” refers to a nucleic acid (e.g., DNA) sequence that comprises coding sequences necessary for the production of a polypeptide, precursor, or RNA (e.g., rRNA, tRNA). The term also encompasses the coding region of a structural gene and the sequences located adjacent to the coding region on both the 5′ and 3′ end which allow for the expression of the sequence. Sequences located 5′ of the coding region and present on the mRNA are referred to as 5′ non-translated sequences. Sequences located 3′ or downstream of the coding region and present on the mRNA are referred to as 3′ non-translated sequences. A genomic form or clone of a gene contains the coding region interrupted with non-coding sequences termed “introns” or “intervening regions” or “intervening sequences.” Introns are segments of a gene that are transcribed into nuclear RNA (hnRNA); introns may contain regulatory elements such as enhancers. Introns are removed or “spliced out” from the nuclear or primary transcript; introns therefore are absent in the messenger RNA (mRNA) transcript. The mRNA functions during translation to specify the sequence or order of amino acids in a nascent polypeptide.

[0023] As used herein, the term “intragenic deletion” refers to any internal deletion in the genomic DNA of a gene. Thus, the term “intragenic deletion of ERG” refers to any internal deletion in the genomic DNA comprising the ERG gene. As used herein a focal intragenic deletion of an ERG allele is characterized phenotypically by the association of the intragenic deletion with a novel subtype of B-progenitor ALL. At the genetic level, the focal intragenic deletion is part of the genetic make-up of the cell (contained within the genomic DNA). In specific embodiments, the intragenic deletion of ERG can comprise a deletion of at least 1, 10, 20, 40, 80, 100, 200, 300, 400, 500, 600, 700, 800, 1000 or more nucleotides in the ERG gene. In specific embodiments, the intragenic deletion of ERG comprises an internal deletion of various exons including, for example, a deletion of at least one of exon 0, exon 1, exon 2, exon 3, exon 4, exon 5, exon 6, exon 7, exon 8, exon 9, exon 10, exon 11, exon 12, and/or exon 13 of the ERG gene or any combination thereof. It is recognized that, as used herein, a deletion of an exon or intron can encompass both the complete absence of the recited exon or intron sequence, or the absence of at least a fragment of the full exon or full intron. In other words, the chromosomal break can occur anywhere within the recited exon or in the flanking intron. The exons of the human ERG gene are designated in the genomic sequence of the human ERG gene in SEQ ID NO: 1.

[0024] The term “junction of an intragenic deletion” refers to the region of the polynucleotide which is joined following the deletion of the intervening sequences. In view of the characterization of multiple focal intragenic deletions of ERG, novel polynucleotides are provided that comprise the novel polynucleotide junctions of ERG that occur following the various focal intragenic deletions.

[0025] One of skill will recognize that while the intragenic deletion of ERG occurs in the genomic DNA, the deletions will further impact the RNA transcripts transcribed from the mutant ERG gene. Thus, the present invention provides both polynucleotides comprising the sequence of the genomic DNA having the focal intragenic deletion of ERG, and further provides polynucleotide sequences from the transcripts (partially or fully processed) or cDNAs which are derived from the focal intragenic deletion of the ERG gene. Such polynucleotides of the ERG genome or ERG transcripts are provided herein as is an extensive characterization of the novel junction sequences that occur as a result of the deletion. Thus, a polynucleotide sequence that comprises a junction of an ERG intragenic deletion can be derived from the genomic DNA or mRNA or cDNA. It is therefore recognized that the “detection” of the focal intragenic deletion of ERG can be performed by directly detecting the deletion in the genomic DNA, by directly detecting the deletion in an RNA or cDNA transcribed from the genomic DNA, or by directly detecting the truncated form of the ERG polypeptide that results from the intragenic deletion of ERG. Methods and compositions that provide for these forms of detection are discussed in further detail elsewhere herein. Non-limiting novel junctions appearing in the mRNA or cDNAs comprising the intragenic deletions are set forth in SEQ ID NO: 4, 5, 7, 8, 9, 10, 11, 12, 13, 14, 21 or 22 or variants and fragments thereof.

[0026] In specific embodiments, the focal intragenic deletion of ERG comprises an internal deletion of various exons including, for example, a deletion of exon 6 through exon 10. In further embodiments, the genomic abnormality resulting in the deletion of exon 6 through exon 10 results from a proximal chromosomal break point occurring within intron 5 and a distal chromosomal break point occurring within intron 10. See, for example, SEQ ID NO:1. This specific genomic abnormality is referred to herein as ERGΔexon6-10. The cDNA derived from isoform 1 of the ERGΔexon6-10 intragenic deletion is set forth in SEQ ID NO:4 and shown in FIG. 9. The genomic sequence of ERG Δexon6-10 is shown in SEQ ID NO: 19. The various intron and exon boundaries are denoted.

[0027] In other embodiments, the focal intragenic deletion of ERG comprises an internal deletion of various exons including, for example, a deletion of exon 6 through exon 12. In further embodiments, the genomic abnormality resulting in the deletion of exon 6 through exon 12 results from a proximal chromosomal break point occurring within intron 5 and a distal chromosomal break point occurring within intron 12. See, for example, FIG. 3. This specific genomic abnormality is referred to herein as EEGΔexon6-12. The cDNA derived from isoform 1 of the EEGΔexon6-12 intragenic deletion is set forth in SEQ ID NO:5 and shown in FIG. 7.

[0028] In specific embodiments, the focal intragenic deletion of ERG comprises an internal deletion of various exons including, for example, a deletion of exon 6 through exon 13. In further embodiments, the genomic abnormality resulting in the deletion of exon 6 through exon 13 results from a proximal chromosomal break point occurring within intron 5 and a distal chromosomal break point in the 3′ untranslated region of ERG. See, for example, FIG. 3. This specific genomic abnormality is referred to herein as EEGΔexon6-13. The predicted cDNA derived from isoform 1 of the EEGΔexon6-13 intragenic deletion is set forth in SEQ ID NO:6 and shown in FIG. 8. Such sequences are predicted to be hypomorphic and not act as a competitor (or dominant negative inhibitor) of normal ERG.

[0029] In specific embodiments, the polynucleotides comprising the junctions of the ERG intragenic deletion or active variants and fragments thereof, do not encode an ERG polypeptide, but rather have the ability to specifically detect the ERG intragenic deletion in the nucleic acid complement of a biological sample, and thereby allow for the identification and/or classification and/or the prognosis and/or predisposition of the biological sample to ALL, more particularly, a novel subtype of B-progenitor ALL. Various methods and compositions to carry out such methods are disclosed elsewhere herein.

[0030] Alternatively, the polynucleotides comprising the junctions of the ERG intragenic deletion or active variants and fragments thereof, encode a C-terminal domain deleted ERG polypeptide or active variant or fragment thereof. As used herein, a “C-terminal deleted domain or fragment thereof” comprises any of the following domains (or fragments of the domains) of the ERG protein: PNT domain, CAE domain, CD domain, ETS domain and TA domain. A “C-terminal domain deleted polypeptide” comprises any ERG polypeptide that lacks at least one of these domains or at least a fragment of one of these domains.

[0031] As discussed in further detail herein, in specific embodiments, the C-terminal domain deleted ERG polypeptides of the invention do not comprises a DNA binding PNT domain or a CAE domain. Thus, in specific embodiments, the C-terminal domain deleted ERG polypeptide comprises the CD domain and the ETS, transactivation domain and does not comprise the DNA binding PNT domain and CAE domain. See, for example, ERG_D6-10_distal ORF set forth in SEQ ID NO: 16. In other embodiments, the C-terminal domain deleted ERG polypeptide comprises a fragment of the CD domain and the ETS, transactivation domain and does not comprise the DNA binding PNT domain or CAE domain. See, for example, ERG_D6-12_distal ORF as set forth in SEQ ID NO:17. In specific embodiments, the C-terminal domain deleted ERG polypeptides have dominant negative ERG activity.

[0032] As used herein, “dominant negative ERG activity” of a C-terminal domain deleted ERG polypeptide comprises an activity that inhibits the activity of the wild type form of the ERG polypeptide. Such activity can be assayed for using various methods known in the art, including for example, Luciferase reporter assays of ERG transactivating activity. See, for example, Carrere et al (1998) Oncogene 16:3261 and Zou et al (2005) Mol Cell Biol 25:6235, both of which are incorporated by reference. Alternatively, the dominate negative activity can be assessed by assaying for a phenotype of leukemia, and is specific embodiments, a novel subtype of B-progenitor ALL.

[0033] In other embodiments, the intragenic deletion of ERG results in a decreased level of expression of the ERG polypeptide. A decreased level of expression of the ERG polypeptide results in at least about a 10%, about a 20%, about a 30%, about a 40%, about a 50%, about a 60%, about a 70%, about a 80%, about a 90%, about a 95% or about a 100% loss of expression of the ERG polypeptide. The decreased level of expression can occur at any stage in the processing and synthesis of protein, including, for example, during transcription or translation. In other embodiments, a decreased level of the activity of the ERG polypeptide can occur and results in at least about a 10%, about a 20%, about a 30%, about a 40%, about a 50%, about a 60%, about a 70%, about a 80%, about a 90%, about a 95% or about a 100% loss of ERG polypeptide activity.

[0034] In specific embodiments, detecting the ERG intragenic deletions find use in selecting a therapy for a subject affect by leukemia. Thus, upon the detection of the ERG intragenic deletion, and in specific embodiments, the identification of the specific ERG intragenic deletion, a therapy may be selected or customized for the subject in view of the ERG intragenic deletion.

### II. Methods of Detecting ERG Intragenic Deletions

[0035] a. Detecting Polynucleotides

[0036] Various methods and compositions for identifying a genomic abnormality in the ERG gene are provided. Such methods find use in identifying and/or detecting such rearrangements in any biological material and thus allow for the identification, prognosis, classification, treatment, and/or diagnosis of leukemia or a genetic predisposition to ALL, more particularly, to the novel subtype of B-progenitor ALL.

[0037] In one embodiment, a method is provided for assaying a biological sample for an intragenic deletion of the ERG gene. The method comprises (a) providing a biological sample from a subject, wherein the biological sample comprises the nucleic acid complement of the subject and (b) determining if the nucleic acid complement comprises an intragenic deletion in the ERG gene. In such a method, the presence of the intragenic deletion of the ERG gene is indicative of ALL, more particularly, the novel subtype of B-progenitor ALL.

[0038] Such methods can be used to identify the various ERG intragenic deletions discussed above, including for example, a deletion of at least one exon of the ERG gene or a deletion that results in the decreased expression of the ERG. In specific methods, the ERG intragenic deletion that is detected comprises a deletion of exon 6 through exon 10 of the ERG gene; a deletion of exon 6 through exon 12 of the ERG gene; or a deletion of exon 6 through exon 13 of the ERG gene.

[0039] It is further recognized that the diagnostic method used to detect the intragenic deletion may be one which allows for the detection of the deletion without discriminating between the various ERG intragenic deletions disclosed herein. Alternatively, the method employed may be such as to allow for a specific ERG intragenic deletion to be distinguished. In other methods, an initial assay may be performed to confirm the presence of an ERG intragenic deletion but not identify the specific deletion. If desired, a secondary assay can then performed to determine the identity of the particular ERG intragenic deletion. The second assay may use a different detection technology than the initial assay.

[0040] It is further recognized that the ERG intragenic deletion may be detected along with other markers in a multiplex or panel format. Markers are selected for their predictive value alone or in combination with the ERG intragenic deletion. Markers for other leukemias, diseases, infections, and metabolic conditions are also contemplated for inclusion in a multiplex of panel format. Ultimately, the information provided by the methods of the present invention will assist a physician in choosing the best course of treatment for a particular patient.

[0041] As used herein, the use of the term “polynucleotide” is not intended to limit the present invention to polynucleotides comprising DNA. Those of ordinary skill in the art will recognize that polynucleotides, can comprise ribonucleotides and combinations of ribonucleotides and deoxyribonucleotides. Such deoxyribonucleotides and ribonucleotides include both naturally occurring molecules and synthetic analogues. The polynucleotides of the invention also encompass all forms of sequences including, but not limited to, single-stranded forms, double-stranded forms, hairpins, stem-and-loop structures, and the like.

[0042] As used herein, the “nucleic acid complement” of a sample comprises any polynucleotide contained in the sample. The nucleic acid complement that is employed in the methods and compositions of the invention can include all of the polynucleotides contained in the sample or any fraction thereof. For example, the nucleic acid complement could comprise the genomic DNA and/or the mRNA and/or cDNAs of the given biological sample. Thus, the intragenic deletion of ERG can be detected in the genomic DNA or through the transcribed products thereof.

[0043] As used herein, a “biological sample” can comprise any sample in which one desires to determine if the nucleic acid complement of the sample contains an ERG intragenic deletion. For example, a biological sample can comprise a sample from any organism, including a mammal, such as a human, a primate, a rodent, a domestic animal (such as a feline or canine) or an agricultural animal (such as a ruminant, horse, swine or sheep). The biological sample can be derived from any cell, tissue or biological fluid from the organism of interest. The sample may comprises any clinically relevant tissue, such as, but not limited to, bone marrow samples, tumor biopsy, fine needle aspirate, or a sample of bodily fluid, such as, blood, plasma, serum, lymph, ascitic fluid, cystic fluid or urine. In other embodiments, the biological sample comprises peripheral blood, bone marrow, apheresis samples, cerebrospinal fluid, saliva, urine, gonadal tissue, tissue (e.g. chloroma) biopsies, or any other human tissue sample potentially involved by leukemic infiltration. The sample used in the methods of the invention will vary based on the assay format, nature of the detection method, and the tissues, cells or extracts which are used as the sample. It is recognized that the sample typically requires preliminary processing designed to isolate or enrich the sample for the genomic DNA. A variety of techniques known to those of ordinary skill in the art may be used for this purpose.

[0044] As used herein, a “probe” is an isolated polynucleotide to which is attached a conventional detectable label or reporter molecule, e.g., a radioactive isotope, ligand, chemiluminescent agent, enzyme, etc. Such a probe is complementary to a strand of a target polynucleotide, which in specific embodiments of the invention comprise a polynucleotide comprising a junction of the ERG intragenic deletion. If the novel junction is in the transcribed mRNA, such probes can comprise the polynucleotide set forth in any one of SEQ ID NOS: 4, 5, 7, 8, 9, 10, 11, 12, 13, 14, 19, 21, 22 or a variant or fragment thereof. Deoxyribonucleic acid probes may include those generated by PCR using ERG specific primers, oligonucleotide probes synthesized in vitro, or DNA obtained from bacterial artificial chromosome, fosmid or cosmid libraries. Probes include not only deoxyribonucleic or ribonucleic acids but also polyamides and other probe materials that can specifically detect the presence of the target DNA sequence. For nucleic acid probes, examples of detection reagents include, but are not limited to radiolabeled probes, enzymatic labeled probes (horse radish peroxidase, alkaline phosphatase), affinity labeled probes (biotin, avidin, or steptavidin), and fluorescent labeled probes (6-FAM, VIC, TAMRA, MGB, fluorescein, rhodamine, texas red [for BAC/fosmids]). One skilled in the art will readily recognize that the nucleic acid probes described in the present invention can readily be incorporated into one of the established kit formats which are well known in the art.

[0045] As used herein, “primers” are isolated polynucleotides that are annealed to a complementary target DNA strand by nucleic acid hybridization to form a hybrid between the primer and the target DNA strand., then extended along the target DNA strand by a polymerase, e.g., a DNA polymerase. Primer pairs of the invention refer to their use for amplification of a target polynucleotide, e.g., by the polymerase chain reaction (PCR) or other conventional nucleic-acid amplification methods. “PCR” or “polymerase chain reaction” is a technique used for the amplification of specific DNA segments (see, U.S. Pat. Nos. 4,683,195 and 4,800,159; herein incorporated by reference).

[0046] Probes and primers are of sufficient nucleotide length to bind to the target DNA sequence and specifically detect and/or identify a polynucleotide comprising an ERG intragenic deletion or a junction of an ERG intragenic deletion. It is recognized that the hybridization conditions or reaction conditions can be determined by the operator to achieve this result. This length may be of any length that is of sufficient length to be useful in a detection method of choice. Generally, 8, 11, 14, 16, 18, 20, 22, 24, 26, 28, 30, 40, 50, 75, 100, 200, 300, 400, 500, 600, 700 nucleotides or more, or between about 11-20, 20-30, 30-40, 40-50, 50-100, 100-200, 200-300, 300-400, 400-500, 500-600, 600-700, 700-800, or more nucleotides in length are used. Such probes and primers can hybridize specifically to a target sequence under high stringency hybridization conditions. Probes and primers according to embodiments of the present invention may have complete DNA sequence identity of contiguous nucleotides with the target sequence, although probes differing from the target DNA sequence and that retain the ability to specifically detect and/or identify a target DNA sequence may be designed by conventional methods. Accordingly, probes and primers can share about 80%, 85%, 90%, 91%, 92%, 93%, 94%, 95%, 96%, 97%, 98%, 99% or greater sequence identity or complementarity to the target polynucleotide (i.e., SEQ ID NO: 1, 2, 3, 4, 5, 6, 7, 8, 9, 10, 11, 12, 13, 14, 19, 21, 22, or to a fragment thereof). Probes can be used as primers, but are generally designed to bind to the target DNA or RNA and are not used in an amplification process.

[0047] Specific primers can be used to amplify the junction of an ERG intragenic deletion to produce an amplicon that can be used as a “specific probe” or can itself be detected for identifying an ERG intragenic deletion in a biological sample. When the probe is hybridized with the polynucleotides of a biological sample under conditions which allow for the binding of the probe to the sample, this binding can be detected and thus allow for an indication of the presence of the ERG intragenic deletion in the biological sample. Such identification of a bound probe has been described in the art. The specific probe may comprise a sequence of at least 80%, between 80 and 85%, between 85 and 90%, between 90 and 95%, and between 95 and 100% identical (or complementary) to a specific region of the ERG gene or cDNA.

[0048] As used herein, “amplified DNA” or “amplicon” refers to the product of polynucleotide amplification of a target polynucleotide that is part of a nucleic acid template. For example, to determine whether the nucleic acid complement of a biological sample comprises an ERG intragenic deletion, the nucleic acid complement of the biological sample may be subjected to a polynucleotide amplification method using a primer pair that includes a first primer derived from the 5′ flanking sequence adjacent to a junction of an ERG intragenic deletion, and a second primer derived from the 3′ flanking sequence adjacent to the junction of the ERG intragenic deletion to produce an amplicon that is diagnostic for the presence of the ERG intragenic deletion. By “diagnostic” for an ERG intragenic deletion is intended the use of any method or assay which discriminates between the presence or absence of an ERG intragenic deletion in a biological sample. The amplicon is of a length and has a sequence that is also diagnostic for the ERG intragenic deletion (i.e., has a junction sequence of the ERG intragenic deletion). The amplicon may range in length from the combined length of the primer pairs plus one nucleotide base pair to any length of amplicon producible by a DNA amplification protocol. A member of a primer pair derived from the flanking sequence may be located a distance from the junction or breakpoint. This distance can range from one nucleotide base pair up to the limits of the amplification reaction, or about twenty thousand nucleotide base pairs. The use of the term “amplicon” specifically excludes primer dimers that may be formed in the DNA thermal amplification reaction.

[0049] Methods for preparing and using probes and primers are described, for example, in Molecular Cloning: A Laboratory Manual, 2.sup.nd ed, vol. 1-3, ed. Sambrook et al., Cold Spring Harbor Laboratory Press, Cold Spring Harbor, N.Y. 1989 (hereinafter, “Sambrook et al., 1989”); Current Protocols in Molecular Biology, ed. Ausubel et al., Greene Publishing and Wiley-Interscience, New York, 1992 (with periodic updates) (hereinafter, “Ausubel et al., 1992”); and Innis et al., PCR Protocols: A Guide to Methods and Applications, Academic Press: San Diego, 1990. PCR primer pairs can be derived from a known sequence, for example, by using computer programs intended for that purpose such as the PCR primer analysis tool in Vector NTI version 10 (Informax Inc., Bethesda Md.); PrimerSelect (DNASTAR Inc., Madison, Wis.); and Primer3 (Version 0.4.0.COPYRGT., 1991, Whitehead Institute for Biomedical Research, Cambridge, Mass.). Additionally, the sequence can be visually scanned and primers manually identified using guidelines known to one of skill in the art.

[0050] As outline in further detail below, any conventional nucleic acid hybridization or amplification or sequencing method can be used to specifically detect the presence of a polynucleotide arising due to an ERG intragenic deletion. By “specifically detect” is intended that the polynucleotide can be used either as a primer to amplify the junction of an ERG intragenic deletion or the polynucleotide can be used as a probe that hybridizes under stringent conditions to a polynucleotide having an ERG intragenic deletion. The level or degree of hybridization which allows for the specific detection of the ERG intragenic deletion is sufficient to distinguish the polynucleotide with the ERG intragenic deletion from a polynucleotide that does not contain the deletion and thereby allow for discriminately identifying an ERG intragenic deletion. By “shares sufficient sequence identity or complementarity to allow for the amplification of an ERG intragenic deletion” is intended the sequence shares at least 80%, 85%, 90%, 91%, 92%, 93%, 94%, 95%, 96%, 97%, 98%, 99% or 100% identity or complementarity to a fragment or across the full length of the ERG polynucleotide.

[0051] The ERG intragenic deletion may be detected using a variety of nucleic acid techniques known to those of ordinary skill in the art, including but not limited to: nucleic acid sequencing; nucleic acid hybridization; and, nucleic acid amplification. Nucleic acid hybridization includes methods using labeled probes directed against purified DNA, amplified DNA, and fixed leukemia cell preparations (fluorescence in situ hybridization).

[0052] Illustrative non-limiting examples of nucleic acid sequencing techniques include, but are not limited to, chain terminator (Sanger) sequencing and dye terminator sequencing. Chain terminator sequencing uses sequence-specific termination of a DNA synthesis reaction using modified nucleotide substrates. Extension is initiated at a specific site on the template DNA by using a short radioactive, or other labeled, oligonucleotide primer complementary to the template at that region. The oligonucleotide primer is extended using a DNA polymerase, standard four deoxynucleotide bases, and a low concentration of one chain terminating nucleotide, most commonly a di-deoxynucleotide. This reaction is repeated in four separate tubes with each of the bases taking turns as the di-deoxynucleotide. Limited incorporation of the chain terminating nucleotide by the DNA polymerase results in a series of related DNA fragments that are terminated only at positions where that particular di-deoxynucleotide is used. For each reaction tube, the fragments are size-separated by electrophoresis in a slab polyacrylamide gel or a capillary tube filled with a viscous polymer. The sequence is determined by reading which lane produces a visualized mark from the labeled primer as you scan from the top of the gel to the bottom. Dye terminator sequencing alternatively labels the terminators. Complete sequencing can be performed in a single reaction by labeling each of the di-deoxynucleotide chain-terminators with a separate fluorescent dye, which fluoresces at a different wavelength.

[0053] The present invention further provides methods for identifying nucleic acids containing an ERG intragenic deletion which do not necessarily require sequence amplification and are based on, for example, the known methods of Southern (DNA:DNA) blot hybridizations, in situ hybridization and FISH of chromosomal material, using appropriate probes. Such nucleic acid probes can be used that comprise nucleotide sequences in proximity to the ERG intragenic deletion junction, or breakpoint. By “in proximity to” is intended within about 100 kilobases (kb) of the ERG intragenic deletion junction.

[0054] In situ hybridization (ISH) is a type of hybridization that uses a labeled complementary DNA or RNA strand as a probe to localize a specific DNA or RNA sequence in a portion or section of tissue (in situ), or, if the tissue is small enough, the entire tissue (whole mount ISH). DNA ISH can be used to determine the structure of chromosomes. Sample cells and tissues are usually treated to fix the target transcripts in place and to increase access of the probe. The probe hybridizes to the target sequence at elevated temperature, and then the excess probe is washed away. The probe that was labeled with either radio-, fluorescent- or antigen-labeled bases is localized and quantitated in the tissue using either autoradiography, fluorescence microscopy or immunohistochemistry, respectively. ISH can also use two or more probes, labeled with radioactivity or the other non-radioactive labels, to simultaneously detect two or more transcripts. In some embodiments, the ERG intragenic deletion is detected using fluorescence in situ hybridization (FISH).

[0055] In specific embodiments, probes for detecting an ERG intragenic deletion are labeled with appropriate fluorescent or other markers and then used in hybridizations. The Examples section provided herein sets forth various protocol that are effective for detecting the genomic abnormalities, but one of skill in the art will recognize that many variations of these assay can be used equally well. Specific protocols are well known in the art and can be readily adapted for the present invention. Guidance regarding methodology may be obtained from many references including: In situ Hybridization: Medical Applications (eds. G. R. Coulton and J. de Belleroche), Kluwer Academic Publishers, Boston (1992); In situ Hybridization: hi Neurobiology; Advances in Methodology (eds. J. H. Eberwine, K. L. Valentino, and J. D. Barchas), Oxford University Press Inc., England (1994); In situ Hybridization: A Practical Approach (ed. D. G. Wilkinson), Oxford University Press Inc., England (1992)); Kuo et al. (1991) Am. J. Hum. Genet. 42:112-119; Klinger et al. (1992) Am. J. Hum. Genet. 51:55-65; and Ward et al. (1993) Am. J. Hum. Genet. 52:854-865). There are also kits that are commercially available and that provide protocols for performing FISH assays (available from e.g., Oncor, Inc., Gaithersburg, Md.). Patents providing guidance on methodology include U.S. Pat. Nos. 5,225,326; 5,545,524; 6,121,489 and 6,573,043. All of these references are hereby incorporated by reference in their entirety and may be used along with similar references in the art and with the information provided in the Examples section herein to establish procedural steps convenient for a particular laboratory.

[0056] Southern blotting can be used to detect specific DNA sequences. In such methods, DNA that is extracted from a sample is fragmented, electrophoretically separated on a matrix gel, and transferred to a membrane filter. The filter bound DNA is subject to hybridization with a labeled probe complementary to the sequence of interest. Hybridized probe bound to the filter is detected.

[0057] In hybridization techniques, all or part of a polynucleotide that selectively hybridizes to a target polynucleotide having an ERG intragenic deletion is employed. By “stringent conditions” or “stringent hybridization conditions” when referring to a polynucleotide probe is intended conditions under which a probe will hybridize to its target sequence to a detectably greater degree than to other sequences (e.g., at least 2-fold over background). Stringent conditions are sequence-dependent and will be different in different circumstances. By controlling the stringency of the hybridization and/or washing conditions, target sequences that are 100% complementary to the probe can be identified (homologous probing). Alternatively, stringency conditions can be adjusted to allow some mismatching in sequences so that lower degrees of identity are detected (heterologous probing). Generally, a probe is less than about 1000 nucleotides in length or less than 500 nucleotides in length.

[0058] As used herein, a substantially identical or complementary sequence is a polynucleotide that will specifically hybridize to the complement of the nucleic acid molecule to which it is being compared under high stringency conditions. Appropriate stringency conditions which promote DNA hybridization, for example, 6× sodium chloride/sodium citrate (SSC) at about 45° C., followed by a wash of 2×SSC at 50° C., are known to those skilled in the art or can be found in Current Protocols in Molecular Biology, John Wiley & Sons, N.Y. (1989), 6.3.1-6.3.6. Typically, stringent conditions for hybridization and detection will be those in which the salt concentration is less than about 1.5 M Na ion, typically about 0.01 to 1.0 M Na ion concentration (or other salts) at pH 7.0 to 8.3 and the temperature is at least about 30° C. for short probes (e.g., 10 to 50 nucleotides) and at least about 60° C. for long probes (e.g., greater than 50 nucleotides). Stringent conditions may also be achieved with the addition of destabilizing agents such as formamide. Exemplary low stringency conditions include hybridization with a buffer solution of 30 to 35% formamide, 1 M NaCl, 1% SDS (sodium dodecyl sulphate) at 37° C., and a wash in 1× to 2×SSC (20×SSC=3.0 M NaC1/0.3 M trisodium citrate) at 50 to 55° C. Exemplary moderate stringency conditions include hybridization in 40 to 45% formamide, 1.0 M NaCl, 1% SDS at 37° C., and a wash in 0.5× to 1×SSC at 55 to 60° C. Exemplary high stringency conditions include hybridization in 50% formamide, 1 M NaCl, 1% SDS at 37° C., and a wash in 0.1×SSC at 60 to 65° C. Optionally, wash buffers may comprise about 0.1% to about 1% SDS. Duration of hybridization is generally less than about 24 hours, usually about 4 to about 12 hours. The duration of the wash time will be at least a length of time sufficient to reach equilibrium.

[0059] In hybridization reactions, specificity is typically the function of post-hybridization washes, the critical factors being the ionic strength and temperature of the final wash solution. For DNA-DNA hybrids, the Tₘ can be approximated from the equation of Meinkoth and Wahl (1984) Anal. Biochem. 138:267-284: Tₘ=81.5° C.+16.6 (log M)+0.41 (% GC)−0.61 (% form)−500/L; where M is the molarity of monovalent cations, % GC is the percentage of guanosine and cytosine nucleotides in the DNA, % form is the percentage of formamide in the hybridization solution, and L is the length of the hybrid in base pairs. The Tₘ is the temperature (under defined ionic strength and pH) at which 50% of a complementary target sequence hybridizes to a perfectly matched probe. Tₘ is reduced by about 1° C. for each 1% of mismatching; thus, Tₘ, hybridization, and/or wash conditions can be adjusted to hybridize to sequences of the desired identity. For example, if sequences with ≧90% identity are sought, the Tₘ can be decreased 10° C. Generally, stringent conditions are selected to be about 5° C. lower than the thermal melting point (Tₘ) for the specific sequence and its complement at a defined ionic strength and pH. However, severely stringent conditions can utilize a hybridization and/or wash at 1, 2, 3, or 4° C. lower than the thermal melting point (Tₘ); moderately stringent conditions can utilize a hybridization and/or wash at 6, 7, 8, 9, or 10° C. lower than the thermal melting point (Tₘ); low stringency conditions can utilize a hybridization and/or wash at 11, 12, 13, 14, 15, or 20° C. lower than the thermal melting point (Tₘ). Using the equation, hybridization and wash compositions, and desired Tₘ, those of ordinary skill will understand that variations in the stringency of hybridization and/or wash solutions are inherently described. If the desired degree of mismatching results in a Tₘ of less than 45° C. (aqueous solution) or 32° C. (formamide solution), it is optimal to increase the SSC concentration so that a higher temperature can be used. An extensive guide to the hybridization of nucleic acids is found in Tijssen (1993) Laboratory Techniques in Biochemistry and Molecular Biology—Hybridization with Nucleic Acid Probes, Part I, Chapter 2 (Elsevier, New York); and Ausubel et al., eds. (1995) Current Protocols in Molecular Biology, Chapter 2 (Greene Publishing and Wiley-Interscience, New York). See Sambrook et al. (1989) Molecular Cloning: A Laboratory Manual (2d ed., Cold Spring Harbor Laboratory Press, Plainview, N.Y.) and Haymes et al. (1985) In: Nucleic Acid Hybridization, a Practical Approach, IRL Press, Washington, D.C.

[0060] A polynucleotide is said to be the “complement” of another polynucleotide if they exhibit complementarity. As used herein, molecules are said to exhibit “complete complementarity” when every nucleotide of one of the polynucleotide molecules is complementary to a nucleotide of the other. Two molecules are said to be “minimally complementary” if they can hybridize to one another with sufficient stability to permit them to remain annealed to one another under at least conventional “low-stringency” conditions. Similarly, the molecules are said to be “complementary” if they can hybridize to one another with sufficient stability to permit them to remain annealed to one another under conventional “high-stringency” conditions.

[0061] Regarding the amplification of a target polynucleotide (e.g., by PCR) using a particular amplification primer pair, “stringent conditions” are conditions that permit the primer pair to hybridize to the target polynucleotide to which a primer having the corresponding sequence (or its complement) would bind and preferably to produce an identifiable amplification product (the amplicon) having a junction of an ERG intragenic deletion in a DNA thermal amplification reaction. In a PCR approach, oligonucleotide primers can be designed for use in PCR reactions to amplify a junction of an ERG intragenic deletion. Methods for designing PCR primers and PCR cloning are generally known in the art and are disclosed in Sambrook et al. (1989) Molecular Cloning: A Laboratory Manual (2d ed., Cold Spring Harbor Laboratory Press, Plainview, N.Y.). See also Innis et al., eds. (1990) PCR Protocols: A Guide to Methods and Applications (Academic Press, New York); Innis and Gelfand, eds. (1995) PCR Strategies (Academic Press, New York); and Innis and Gelfand, eds. (1999) PCR Methods Manual (Academic Press, New York). Methods of amplification are further described in U.S. Pat. Nos. 4,683,195, 4,683,202 and Chen et al. (1994) PNAS 91:5695-5699. These methods as well as other methods known in the art of DNA amplification may be used in the practice of the embodiments of the present invention. It is understood that a number of parameters in a specific PCR protocol may need to be adjusted to specific laboratory conditions and may be slightly modified and yet allow for the collection of similar results. These adjustments will be apparent to a person skilled in the art.

[0062] The amplified polynucleotide (amplicon) can be of any length that allows for the detection of the ERG intragenic deletion. For example, the amplicon can be about 10, 50, 100, 200, 300, 500, 700, 100, 2000, 3000, 4000, 5000 nucleotides in length or longer.

[0063] Any primer can be employed in the methods of the invention that allows a junction of the ERG intragenic deletion to be amplified and/or detected. Methods for designing PCR primers are generally known in the art and are disclosed in Sambrook et al. (1989) Molecular Cloning: A Laboratory Manual (2d ed., Cold Spring Harbor Laboratory Press, Plainview, N.Y.). See also Innis et al., eds. (1990) PCR Protocols: A Guide to Methods and Applications (Academic Press, New York); Innis and Gelfand, eds. (1995) PCR Strategies (Academic Press, New York); and Innis and Gelfand, eds. (1999) PCR Methods Manual (Academic Press, New York). Other known methods of PCR that can be used in the methods of the invention include, but are not limited to, methods using paired primers, nested primers, single specific primers, degenerate primers, gene-specific primers, mixed DNA/RNA primers, vector-specific primers, partially mismatched primers, and the like.

[0064] Thus, in specific embodiments, a method of detecting the presence of an ERG intragenic deletion in a biological sample is provided. The method comprises (a) providing a sample comprising the nucleic acid complement of a subject; (b) providing a pair of DNA primer molecules that can amplify an amplicon having a junction of an ERG intragenic deletion (c) providing DNA amplification reaction conditions; (d) performing the DNA amplification reaction, thereby producing a DNA amplicon molecule; and (e) detecting the DNA amplicon molecule. In order for a nucleic acid molecule to serve as a primer or probe it need only be sufficiently complementary in sequence to be able to form a stable double-stranded structure under the particular solvent and salt concentrations employed.

[0065] In still other embodiments, the intragenic deletion of ERG may be amplified prior to or simultaneous with detection. Illustrative non-limiting examples of nucleic acid amplification techniques include, but are not limited to, polymerase chain reaction (PCR), ligase chain reaction (LCR), strand displacement amplification (SDA), and nucleic acid sequence based amplification (NASBA). The polymerase chain reaction (U.S. Pat. Nos. 4,683,195, 4,683,202, 4,800,159 and 4,965,188, each of which is herein incorporated by reference in its entirety), commonly referred to as PCR, uses multiple cycles of denaturation, annealing of primer pairs to opposite strands, and primer extension to exponentially increase copy numbers of a target nucleic acid sequence. For other various permutations of PCR see, e.g., U.S. Pat. Nos. 4,683,195, 4,683,202 and 4,800,159; Mullis et al, (1987) Meth. Enzymol. 155: 335; and, Murakawa et al., (1988) DNA 7: 287, each of which is herein incorporated by reference in its entirety.

[0066] The ligase chain reaction (Weiss (1991) Science 254: 1292, herein incorporated by reference in its entirety), commonly referred to as LCR, uses two sets of complementary DNA oligonucleotides that hybridize to adjacent regions of the target nucleic acid. The DNA oligonucleotides are covalently linked by a DNA ligase in repeated cycles of thermal denaturation, hybridization and ligation to produce a detectable double-stranded ligated oligonucleotide product.

[0067] Strand displacement amplification (Walker et al. (1992) Proc. Natl. Acad. Sci. USA 89: 392-396; U.S. Pat. Nos. 5,270,184 and 5,455,166, each of which is herein incorporated by reference in its entirety), commonly referred to as SDA, uses cycles of annealing pairs of primer sequences to opposite strands of a target sequence, primer extension in the presence of a dNTP[alpha]S to produce a duplex hemiphosphorothioated primer extension product, endonuclease-mediated nicking of a hemimodified restriction endonuclease recognition site, and polymerase-mediated primer extension from the 3′ end of the nick to displace an existing strand and produce a strand for the next round of primer annealing, nicking and strand displacement, resulting in geometric amplification of product. Thermophilic SDA (tSDA) uses thermophilic endonucleases and polymerases at higher temperatures in essentially the same method (EP Pat. No. 0 684 315).

[0068] Non-amplified or amplified ERG intragenic deletions can be detected by any conventional means. For example, the intragenic deletions can be detected by hybridization with a detectably labeled probe and measurement of the resulting hybrids. Illustrative non-limiting examples of detection methods are described below.

[0069] One illustrative detection method, the Hybridization Protection Assay (HPA) involves hybridizing a chemiluminescent oligonucleotide probe (e.g., an acridinium ester-labeled (AE) probe) to the target sequence, selectively hydrolyzing the chemiluminescent label present on unhybridized probe, and measuring the chemiluminescence produced from the remaining probe in a luminometer. See, e.g., U.S. Pat. No. 5,283,174 and Nelson et al. (1995) Nonisotopic Probing, Blotting, and Sequencing, ch. 17 (Larry J. Kricka ed., 2d ed., each of which is herein incorporated by reference in its entirety).

[0070] Another illustrative detection method provides for quantitative evaluation of the amplification process in real-time. Evaluation of an amplification process in “real-time” involves determining the amount of amplicon in the reaction mixture either continuously or periodically during the amplification reaction, and using the determined values to calculate the amount of target sequence initially present in the sample. A variety of methods for determining the amount of initial target sequence present in a sample based on real-time amplification are well known in the art. These include methods disclosed in U.S. Pat. Nos. 6,303,305 and 6,541,205, each of which is herein incorporated by reference in its entirety. Another method for determining the quantity of target sequence initially present in a sample, but which is not based on a real-time amplification, is disclosed in U.S. Pat. No. 5,710,029, herein incorporated by reference in its entirety.

[0071] Amplification products may be detected in real-time through the use of various self-hybridizing probes, most of which have a stem-loop structure. Such self-hybridizing probes are labeled so that they emit differently detectable signals, depending on whether the probes are in a self-hybridized state or an altered state through hybridization to a target sequence. By way of non-limiting example, “molecular torches” are a type of self-hybridizing probe that includes distinct regions of self-complementarity (referred to as “the target binding domain” and “the target closing domain”) which are connected by a joining region (e.g., non-nucleotide linker) and which hybridize to each other under predetermined hybridization assay conditions. In a preferred embodiment, molecular torches contain single-stranded base regions in the target binding domain that are from 1 to about 20 bases in length and are accessible for hybridization to a target sequence present in an amplification reaction under strand displacement conditions. Under strand displacement conditions, hybridization of the two complementary regions, which may be fully or partially complementary, of the molecular torch is favored, except in the presence of the target sequence, which will bind to the single-stranded region present in the target binding domain and displace all or a portion of the target closing domain. The target binding domain and the target closing domain of a molecular torch include a detectable label or a pair of interacting labels (e.g., luminescent/quencher) positioned so that a different signal is produced when the molecular torch is self-hybridized than when the molecular torch is hybridized to the target sequence, thereby permitting detection of probe:target duplexes in a test sample in the presence of unhybridized molecular torches. Molecular torches and a variety of types of interacting label pairs are disclosed in U.S. Pat. No. 6,534,274, herein incorporated by reference in its entirety.

[0072] Another example of a detection probe having self-complementarity is a “molecular beacon.” Molecular beacons include nucleic acid molecules having a target complementary sequence, an affinity pair (or nucleic acid arms) holding the probe in a closed conformation in the absence of a target sequence present in an amplification reaction, and a label pair that interacts when the probe is in a closed conformation. Hybridization of the target sequence and the target complementary sequence separates the members of the affinity pair, thereby shifting the probe to an open conformation. The shift to the open conformation is detectable due to reduced interaction of the label pair, which may be, for example, a fluorophore and a quencher (e.g., DABCYL and EDANS). Molecular beacons are disclosed in U.S. Pat. Nos. 5,925,517 and 6,150,097, herein incorporated by reference in its entirety.

[0073] Other self-hybridizing probes are well known to those of ordinary skill in the art. By way of non-limiting example, probe binding pairs having interacting labels, such as those disclosed in U.S. Pat. No. 5,928,862 (herein incorporated by reference in its entirety) might be adapted for use in the present invention. Probe systems used to detect single nucleotide polymorphisms (SNPs) might also be utilized in the present invention. Additional detection systems include “molecular switches,” as disclosed in U.S. Publ. No. 20050042638, herein incorporated by reference in its entirety. Other probes, such as those comprising intercalating dyes and/or fluorochromes, are also useful for detection of amplification products in the present invention. See, e.g., U.S. Pat. No. 5,814,447 (herein incorporated by reference in its entirety).

[0074] Various methods can be used to detect the ERG intragenic deletion or amplicon having a junction of an ERG intragenic deletion, including, but not limited to, Genetic Bit Analysis (Nikiforov et al. (1994) Nucleic Acid Res. 22: 4167-4175) where a DNA oligonucleotide is designed which overlaps both the adjacent flanking DNA sequence and the inserted DNA sequence. The oligonucleotide is immobilized in wells of a microwell plate. Following PCR of the region of interest (using one primer in the inserted sequence and one in the adjacent flanking sequence) a single-stranded PCR product can be hybridized to the immobilized oligonucleotide and serve as a template for a single base extension reaction using a DNA polymerase and labeled ddNTPs specific for the expected next base. Readout may be fluorescent or ELISA-based. A signal indicates presence of the insert/flanking sequence due to successful amplification, hybridization, and single base extension.

[0075] Another detection method is the Pyrosequencing technique as described by Winge ((2000) Innov. Pharma. Tech. 00: 18-24). In this method, an oligonucleotide is designed that overlaps the junction. The oligonucleotide is hybridized to a single-stranded PCR product from the region of interest (one primer in the inserted sequence and one in the flanking sequence) and incubated in the presence of a DNA polymerase, ATP, sulfurylase, luciferase, apyrase, adenosine 5′ phosphosulfate and luciferin. dNTPs are added individually and the incorporation results in a light signal which is measured. A light signal indicates the presence of the transgene insert/flanking sequence due to successful amplification, hybridization, and single or multi-base extension.

[0076] Fluorescence Polarization as described by Chen et al. ((1999) Genome Res. 9: 492-498, 1999) is also a method that can be used to detect an amplicon of the invention. Using this method, an oligonucleotide is designed which overlaps the inserted DNA junction. The oligonucleotide is hybridized to a single-stranded PCR product from the region of interest (one primer in the inserted DNA and one in the flanking DNA sequence) and incubated in the presence of a DNA polymerase and a fluorescent-labeled ddNTP. Single base extension results in incorporation of the ddNTP. Incorporation can be measured as a change in polarization using a fluorometer. A change in polarization indicates the presence of the genomic abnormality sequence due to successful amplification, hybridization, and single base extension.

[0077] Taqman® (PE Applied Biosystems, Foster City, Calif.) is described as a method of detecting and quantifying the presence of a DNA sequence and is fully understood in the instructions provided by the manufacturer. Briefly, a FRET oligonucleotide probe is designed which overlaps the junction. The FRET probe and PCR primers (one primer in the insert DNA sequence and one in the flanking genomic sequence) are cycled in the presence of a thermostable polymerase and dNTPs. Hybridization of the FRET probe results in cleavage and release of the fluorescent moiety away from the quenching moiety on the FRET probe. A fluorescent signal indicates the presence of the flanking/transgene insert sequence due to successful amplification and hybridization.

[0078] In one embodiment, the method of detecting an intragenic deletion of ERG comprises (a) contacting the biological sample with a polynucleotide probe that hybridizes under stringent hybridization conditions with a polynucleotide having an ERG intragenic deletion and specifically detects the ERG intragenic deletion; (b) subjecting the sample and probe to stringent hybridization conditions; and (c) detecting hybridization of the probe to the polynucleotide, wherein detection of hybridization indicates the presence of the ERG intragenic deletion.

[0079] B. Detecting Polypeptides

[0080] ERG polypeptides expressed from the ERG gene having the intragenic deletions, including for example, the C-terminal domain deleted ERG polypeptides, may be detected using a variety of protein techniques known to those of ordinary skill in the art, including but not limited to protein sequencing and immunoassays.

[0081] Illustrative non-limiting examples of protein sequencing techniques include, but are not limited to, mass spectrometry and Edman degradation. Mass spectrometry can, in principle, sequence any size protein but becomes computationally more difficult as size increases. A protein is digested by an endoprotease, and the resulting solution is passed through a high pressure liquid chromatography column. At the end of this column, the solution is sprayed out of a narrow nozzle charged to a high positive potential into the mass spectrometer. The charge on the droplets causes them to fragment until only single ions remain. The peptides are then fragmented and the mass-charge ratios of the fragments measured. The mass spectrum is analyzed by computer and often compared against a database of previously sequenced proteins in order to determine the sequences of the fragments. The process is then repeated with a different digestion enzyme, and the overlaps in sequences are used to construct a sequence for the protein.

[0082] In the Edman degradation reaction, the peptide to be sequenced is adsorbed onto a solid surface (e.g., a glass fiber coated with polybrene). The Edman reagent, phenylisothiocyanate (PTC), is added to the adsorbed peptide, together with a mildly basic buffer solution of 12% trimethylamine, and reacts with the amine group of the C-terminal amino acid. The terminal amino acid derivative can then be selectively detached by the addition of anhydrous acid. The derivative isomerizes to give a substituted phenylthiohydantoin, which can be washed off and identified by chromatography, and the cycle can be repeated. The efficiency of each step is about 98%, which allows about 50 amino acids to be reliably determined.

[0083] Illustrative non-limiting examples of immunoassays include, but are not limited to: immunoprecipitation; Western blot; ELISA; immunohistochemistry; immunocytochemistry; flow cytometry; and, immuno-PCR. Polyclonal or monoclonal antibodies detectably labeled using various techniques known to those of ordinary skill in the art (e.g., calorimetric, fluorescent, chemiluminescent or radioactive) are suitable for use in the immunoassays.

[0084] Immunoprecipitation is the technique of precipitating an antigen out of solution using an antibody specific to that antigen. The process can be used to identify protein complexes present in cell extracts by targeting a protein believed to be in the complex. The complexes are brought out of solution by insoluble antibody-binding proteins isolated initially from bacteria, such as Protein A and Protein G. The antibodies can also be coupled to sepharose beads that can easily be isolated out of solution. After washing, the precipitate can be analyzed using mass spectrometry, Western blotting, or any number of other methods for identifying constituents in the complex.

[0085] A Western blot, or immunoblot, is a method to detect protein in a given sample of tissue homogenate or extract. It uses gel electrophoresis to separate denatured proteins by mass. The proteins are then transferred out of the gel and onto a membrane, typically polyvinyldiflroride or nitrocellulose, where they are probed using antibodies specific to the protein of interest. As a result, researchers can examine the amount of protein in a given sample and compare levels between several groups.

[0086] An ELISA, short for Enzyme-Linked ImmunoSorbent Assay, is a biochemical technique to detect the presence of an antibody or an antigen in a sample. It utilizes a minimum of two antibodies, one of which is specific to the antigen and the other of which is coupled to an enzyme. The second antibody will cause a chromogenic or fluorogenic substrate to produce a signal. Variations of ELISA include sandwich ELISA, competitive ELISA, and ELISPOT. Because the ELISA can be performed to evaluate either the presence of antigen or the presence of antibody in a sample, it is a useful tool both for determining serum antibody concentrations and also for detecting the presence of antigen.

[0087] Immunohistochemistry and immunocytochemistry refer to the process of localizing proteins in a tissue section or cell, respectively, via the principle of antigens in tissue or cells binding to their respective antibodies. Visualization is enabled by tagging the antibody with color producing or fluorescent tags. Typical examples of color tags include, but are not limited to, horseradish peroxidase and alkaline phosphatase. Typical examples of fluorophore tags include, but are not limited to, fluorescein isothiocyanate (FITC) or phycoerythrin (PE).

[0088] Flow cytometry is a technique for counting, examining and sorting microscopic particles suspended in a stream of fluid. It allows simultaneous multiparametric analysis of the physical and/or chemical characteristics of single cells flowing through an optical/electronic detection apparatus. A beam of light (e.g., a laser) of a single frequency or color is directed onto a hydrodynamically focused stream of fluid. A number of detectors are aimed at the point where the stream passes through the light beam; one in line with the light beam (Forward Scatter or FSC) and several perpendicular to it (Side Scatter (SSC) and one or more fluorescent detectors). Each suspended particle passing through the beam scatters the light in some way, and fluorescent chemicals in the particle may be excited into emitting light at a lower frequency than the light source. The combination of scattered and fluorescent light is picked up by the detectors, and by analyzing fluctuations in brightness at each detector, one for each fluorescent emission peak, it is possible to deduce various facts about the physical and chemical structure of each individual particle. FSC correlates with the cell volume and SSC correlates with the density or inner complexity of the particle (e.g., shape of the nucleus, the amount and type of cytoplasmic granules or the membrane roughness).

[0089] Immuno-polymerase chain reaction (IPCR) utilizes nucleic acid amplification techniques to increase signal generation in antibody-based immunoassays. Because no protein equivalence of PCR exists, that is, proteins cannot be replicated in the same manner that nucleic acid is replicated during PCR, the only way to increase detection sensitivity is by signal amplification. The target proteins are bound to antibodies which are directly or indirectly conjugated to oligonucleotides. Unbound antibodies are washed away and the remaining bound antibodies have their oligonucleotides amplified. Protein detection occurs via detection of amplified oligonucleotides using standard nucleic acid detection methods, including real-time methods.

### III. Kits

[0090] The materials used in the above assay methods are ideally suited for the preparation of a kit. Various detection reagents can be developed and used to assay the presence of the ERG intragenic deletion. The terms “kits” and “systems,” as used herein in the context of the ERG intragenic deletion detection reagents, are intended to refer to such things as combinations of multiple ERG intragenic deletion detection reagents, or one or more ERG intragenic deletion detection reagents in combination with one or more other types of elements or components (e.g., other types of biochemical reagents, containers, packages, such as packaging intended for commercial sale, substrates to which SNP detection reagents are attached, electronic hardware components, and the like). Accordingly, the present invention further provides ERG intragenic deletion detection kits and systems, including but not limited to, packaged probe and primer sets (e.g., TaqMan probe/primer sets), arrays/microarrays of nucleic acid molecules, and beads that contain one or more probes, primers, or other detection reagents for detecting one or more ERG intragenic deletion. The kits/systems can optionally include various electronic hardware components. For example, arrays (e.g., DNA chips) and microfluidic systems (e.g., lab-on-a-chip systems) provided by various manufacturers typically include hardware components. Other kits/systems (e.g., probe/primer sets) may not include electronic hardware components, but can include, for example, one or more ERG intragenic deletion detection reagents along with other biochemical reagents packaged in one or more containers.

[0091] In some embodiments, an ERG intragenic deletion kit typically contains one or more detection reagents and other components (e.g., a buffer, enzymes, such as DNA polymerases or ligases, chain extension nucleotides, such as deoxynucleotide triphosphates, positive control sequences, negative control sequences, and the like) necessary to carry out an assay or reaction, such as amplification and/or detection of a polynucleotide comprising a junction of one of the ERG intragenic deletion. A kit can further contain means for determining the amount of the target polynucleotide and means for comparing with an appropriate standard, and can include instructions for using the kit to detect the ERG intragenic deletion. In one embodiment, kits are provided which contain the necessary reagents to carry out one or more assays to detect one or more of the ERG intragenic deletion as disclosed herein. The ERG intragenic deletion detection kits/systems may contain, for example, one or more probes, or pairs of probes, that hybridize to a nucleic acid molecule at or near the junction region.

[0092] In specific embodiments, a kit for identifying an ERG intragenic deletion in a biological sample is provided. The kit comprises a first and a second primer, wherein the first and second primer amplify a polynucleotide comprising an ERG intragenic deletion junction and thereby detect an ERG intragenic deletion.

[0093] Further provided are polynucleotide detection kits comprising at least one polynucleotide that can specifically detect an ERG intragenic deletion. In specific embodiments, the polynucleotide comprises at least one polynucleotide molecule of a sufficient length of contiguous nucleotides homologous or complementary to SEQ ID NO: 1, 2, 3, 4, 5, 6, 7, 8, 9, 10, 11, 12, 13, 14, 19, 21, 22 or a variant thereof to allow for the detection of an ERG intragenic deletion.

[0094] Kits can also be used to detect the polypeptide expressed from the ERG gene having the intragenic deletion. In specific embodiments, a C-terminal domain deleted ERG polypeptide is detected. C-terminal domain deleted ERG detection reagents, are intended to refer to such things as at least one C-terminal domain deleted ERG polypeptide detection reagent, or one or more C-terminal domain deleted ERG polypeptide detection reagents in combination with one or more other types of elements or components (e.g., other types of biochemical reagents, containers, packages, such as packaging intended for commercial sale, electronic hardware components, and the like).

[0095] For antibody based detection systems, the present invention provides a kit which comprises an antibody capable of specifically binding to a C-terminal domain deleted ERG polypeptide and one or more of the following: wash reagents and reagents capable of detecting the presence of bound antibodies of the kit.

[0096] In specific embodiments, the kit comprises a compartmentalized kit and includes any kit in which reagents are contained in separate containers. Such containers include small glass containers, plastic containers or strips of plastic or paper. Such containers allow one to efficiently transfer reagents from one compartment to another compartment such that the samples and reagents are not cross-contaminated, and the agents or solutions of each container can be added in a quantitative fashion from one compartment to another. Such containers may include a container which will accept the test sample, a container which contains the antibodies or probes used in the assay, containers which contain wash reagents (such as phosphate buffered saline, Tris-buffers, etc.), and containers which contain the reagents used to detect the bound antibody or the hybridized probe. Any detection reagents known in the art can be used including, but not limited to those described supra.

### IV. Compounds Useful in Modulating the Activity of a C-Terminal Domain Deleted ERG Polypeptide

[0097] Further provided are methods for identifying agents that target a C-terminal domain deleted ERG polypeptide. Thus, methods to screen for compounds that can serve as molecular targets for drugs useful in modulating the activity or the level of expression of a C-terminal domain deleted ERG polypeptide are provided. Such compounds can find use in treating, preventing and/or delaying progression of ALL, more specifically, a novel subtype of B-progenitor ALL. The invention provides a method (also referred to herein as a “screening assay”) for identifying modulators, i.e., candidate or test compounds or agents (e.g., peptides, peptidomimetics, small molecules, nucleic acids or other drugs) that modulate (e g inhibits) the activity of a C-terminal domain deleted ERG polypeptide or decrease the level of a nucleic acid molecule encoding the C-terminal domain deleted ERG polypeptide.

[0098] The test compounds of the present invention can be obtained using any of the numerous approaches in combinatorial library methods known in the art, including biological libraries, spatially addressable parallel solid phase or solution phase libraries, synthetic library methods requiring deconvolution, the “one-bead one-compound” library method, and synthetic library methods using affinity chromatography selection. The biological library approach is limited to peptide libraries, while the other four approaches are applicable to peptide, nonpeptide oligomer, or small molecule libraries of compounds (Lam (1997) Anticancer Drug Des. 12:145).

[0099] Examples of methods for the synthesis of molecular libraries can be found in the art, for example in: DeWitt et al. (1993) Proc. Natl. Acad. Sci. USA 90:6909; Erb et al. (1994) Proc. Natl. Acad. Sci. USA 91:11422; Zuckermann et al. (1994). J. Med. Chem. 37:2678; Cho et al. (1993) Science 261:1303; Carrell et al. (1994) Angew. Chem. Int. Ed. Engl. 33:2059; Carell et al. (1994) Angew. Chem. Int. Ed. Engl. 33:2061; and Gallop et al. (1994) J. Med. Chem. 37:1233.

[0100] Libraries of compounds may be presented in solution (e.g., Houghten (1992) Bio/Techniques 13:412-421), or on beads (Lam (1991) Nature 354:82-84), chips (Fodor (1993) Nature 364:555-556), bacteria (U.S. Pat. No. 5,223,409), spores (U.S. Pat. Nos. 5,571,698; 5,403,484; and 5,223,409), plasmids (Cull et al. (1992) Proc. Natl. Acad. Sci. USA 89:1865-1869), or phage (Scott and Smith (1990) Science 249:386-390; Devlin (1990) Science 249:404-406; Cwirla et al. (1990) Proc. Natl. Acad. Sci. USA 87:6378-6382; and Felici (1991) J. Mol. Biol. 222:301-310).

[0101] The compounds screened in the above assay can be, but are not limited to, small molecules, peptides, carbohydrates, nucleic acids, or vitamin derivatives. The agents can be selected and screened at random or rationally selected or designed using protein modeling techniques. For random screening, agents such as peptides or carbohydrates are selected at random and are assayed for their ability to bind to the C-terminal domain deleted ERG polypeptide or that target the nucleic acid encoding the C-terminal domain deleted ERG polypeptide. Alternatively, agents may be rationally selected or designed. As used herein, an agent is said to be “rationally selected or designed” when the agent is chosen based on the configuration of the C-terminal domain deleted ERG polypeptide. For example, one skilled in the art can readily adapt currently available procedures to generate peptides capable of binding to a specific peptide sequence in order to generate rationally designed antipeptide peptides, see, for example, Hurby et al., “Application of Synthetic Peptides: Antisense Peptides,” in Synthetic Peptides: A User's Guide, W. H. Freeman, New York (1992), pp. 289-307; and Kaspczak et al., Biochemistry 28:9230-2938 (1989).

[0102] Determining the ability of the test compound to specifically bind to a C-terminal domain deleted ERG polypeptide can be accomplished, for example, by coupling the test compound with a radioisotope or enzymatic label such that binding of the test compound to the C-terminal domain deleted ERG polypeptide can be determined by detecting the labeled compound in a complex. For example, test compounds can be labeled with ¹²⁵I, ³⁵S, ¹⁴C, or ³H, either directly or indirectly, and the radioisotope detected by direct counting of radioemmission or by scintillation counting. Alternatively, test compounds can be enzymatically labeled with, for example, horseradish peroxidase, alkaline phosphatase, or luciferase, and the enzymatic label detected by determination of conversion of an appropriate substrate to product.

[0103] In another embodiment, an assay of the present invention is a cell-free assay comprising contacting an C-terminal domain deleted ERG polypeptide with a test compound and determining the ability of the test compound to specifically bind to the C-terminal domain deleted ERG polypeptide. Binding of the test compound to the C-terminal domain deleted ERG polypeptide can be determined either directly or indirectly as described above.

[0104] In another embodiment, an assay is a cell-free assay comprising contacting the C-terminal domain deleted ERG polypeptide with a test compound and determining the ability of the test compound to specifically inhibit the activity of the C-terminal domain deleted ERG polypeptide. Determining the ability of the test compound to inhibit the activity of the C-terminal domain deleted ERG polypeptide using any method that can assay for the dominant negative ERG activity. Such assays are discussed elsewhere herein. In addition, one could assay for the treatment, prevention and delayed progression of ALL, more specifically, the novel subtype of B-progenitor ALL.

[0105] Such desired compounds may be further screened for selectivity by determining whether they suppress or eliminate phenotypic changes or activities associated with expression of the C-terminal domain deleted ERG polypeptide in the cells. The agents are screened by administering the agent to the cell or alternatively, the activity of the selective agent can be monitored in an in vitro assay. It is recognized that it is preferable that a range of dosages of a particular agent be administered to the cells to determine if the agent is useful for treating, preventing or delaying the onset or progression of ALL, more particularly, the novel subtype of B-progenitor ALL.

[0106] There are numerous variations of the above assays which can be used by a skilled artisan in order to isolate agonists. See, for example, Burch, R. M., in Medications Development. Drug Discovery, Databases, and Computer-Aided Drug Design, NIDA Research Monograph 134, NIH Publication No. 93-3638, Rapaka, R. S., and Hawks, R. L., eds., U.S. Dept. of Health and Human Services, Rockville, Md. (1993), pages 37-45.

[0107] Using the above procedures, the present invention provides a compound capable of binding or modulating the activity of a C-terminal domain deleted ERG polypeptide, produced by a method comprising the steps of (a) contacting the compound with the C-terminal domain deleted ERG polypeptide, and (b) determining whether the agent binds or modulates the activity of the C-terminal domain deleted ERG polypeptide. Additional step(s) to determine whether such binding is selective (i.e., does not interfere or minimally interferes with the activity of the wild-type ERG polypeptide) for the C-terminal domain deleted ERG polypeptide may also be employed. Thus, the methods can be used to detect agents that bind and/or modulate the activity of the native/wild type ERG and the C-terminal domain deleted ERG polypeptides or the methods can be used to detect agents that specifically bind and/or modulate the activity of the C-terminal domain deleted ERG polypeptides.

[0108] As used herein, an “ERG target sequence” comprises any ERG sequence that one desires to decrease the level of expression. In specific embodiments, the ERG target sequence encodes a C-terminal ERG truncate polypeptide. By “reduces” or “reducing” the expression level of a polynucleotide or a polypeptide encoded thereby is intended to mean, the polynucleotide or polypeptide level of the ERG target sequence is statistically lower than the polynucleotide level or polypeptide level of the same target sequence in an appropriate control which is not exposed to the silencing element. In particular embodiments, reducing the polynucleotide level and/or the polypeptide level of the target sequence according to the presently disclosed subject matter results in less than 95%, less than 90%, less than 80%, less than 70%, less than 60%, less than 50%, less than 40%, less than 30%, less than 20%, less than 10%, or less than 5% of the polynucleotide level, or the level of the polypeptide encoded thereby, of the same target sequence in an appropriate control. Methods to assay for the level of the RNA transcript, the level of the encoded polypeptide, or the activity of the polynucleotide or polypeptide are discussed elsewhere herein. Thus, the present invention provides methods and compositions to reduce the level of expression of an ERG intragenic deletion by introducing into a cell expressing the ERG intragenic deletion a silencing element which reduces or eliminates the level of expression of an ERG target polynucleotide or the polypeptide encoded thereby.

[0109] As used herein, the term “silencing element” refers to a polynucleotide comprising or encoding an interfering RNA that is capable of reducing or eliminating the level of expression of an ERG target polynucleotide or the polypeptide encoded thereby. The term “interfering RNA” or “RNAi” refers to any RNA molecule which can enter an RNAi pathway and thereby reduce the level of a target polynucleotide of interest or reduce the level of expression of a polynucleotide of interest. RNAi is distinct from so-called “antisense” mechanisms that typically involve inhibition of a target transcript by a single-stranded oligonucleotide through RNase H mediated pathway. See Crooke (ed.) (2001) “Antisense Drug Technology: Principles, Strategies, and Applications,” 1st ed., (Marcel Dekker; ISBN: 0824705661).

[0110] Thus, a silencing element can comprise the interfering RNA, a precursor to the interfering RNA, a template for the transcription of an interfering RNA or a template for the transcription of a precursor interfering RNA, wherein the precursor is processed within the cell to produce an interfering RNA. Thus, for example, a dsRNA silencing element includes a dsRNA molecule, a transcript or polyribonucleotide capable of forming a dsRNA, more than one transcript or polyribonucleotide capable of forming a dsRNA, a DNA encoding dsRNA molecule, or a DNA encoding one strand of a dsRNA molecule. When the silencing element comprises a DNA molecule encoding an interfering RNA, it is recognized that the DNA can be transiently expressed in a cell or stably incorporated into the genome of the cell. Such methods are discussed in further detail elsewhere herein.

[0111] The silencing element can reduce or eliminate the expression level of a target sequence by influencing the level of the target RNA transcript, by influencing translation and thereby affecting the level of the encoded polypeptide, or by influencing expression at the pre-transcriptional level (i.e., via the modulation of chromatin structure, methylation pattern, etc., to alter gene expression). See, e.g., Verdel et al. (2004) Science 303:672-676; Pal-Bhadra et al. (2004) Science 303:669-672; Allshire (2002) Science 297:1818-1819; Volpe et al. (2002) Science 297:1833-1837; Jenuwein (2002) Science 297:2215-2218; and Hall et al. (2002) Science 297:2232-2237. Methods to assay for functional interfering RNA that are capable of reducing or eliminating the level of a sequence of interest are disclosed elsewhere herein.

[0112] Any region of the target ERG polynucleotide having the intragenic deletion can be used to design a domain of the silencing element that shares sufficient sequence identity to allow for the silencing element to decrease the level of the target polynucleotide. In specific embodiments, expression of the silencing element reduces the level of the ERG sequence having the intragenic deletion (i.e., a sequence encoding the ERG C-terminal domain deleted polypeptide), while not reducing or only minimally reducing the level of the native or wild type ERG sequence. For instance, the silencing element can be designed to share sequence identity to novel junctions of the ERG intragenic deletions. Such sequences are disclosed elsewhere herein. See, for example, SEQ ID NO:4-14, 19, 21, and 22. It is recognized that a given silencing element can share about 80%, 85%, 90%, 91%, 92%, 93%, 94%, 95%, 96%, 97%, 98%, 99% or greater sequence identity or complementarity to the target polynucleotide.

[0113] The ability of a silencing element to reduce the level of the ERG target polynucleotide may be assessed directly by measuring the amount of the target transcript using, for example, Northern blots, nuclease protection assays, reverse transcription (RT)-PCR, real-time RT-PCR, microarray analysis, and the like. Alternatively, the ability of the silencing element to reduce the level of the target polynucleotide may be measured directly using a variety of affinity-based approaches including, but not limited to, Western blots, immunoassays, ELISA, flow cytometry, protein microarrays, and the like. In still other methods, the ability of the silencing element to reduce the level of the target polynucleotide can be assessed indirectly, e.g., by measuring a functional activity of the polypeptide encoded by the transcript or by measuring a signal produced by the polypeptide encoded by the transcript.

[0114] A silencing element can be prepared according to any available technique including, but not limited to, chemical synthesis, enzymatic or chemical cleavage in vivo or in vitro, template transcription in vivo or in vitro, or combinations of the foregoing.

[0115] Representative types of silencing elements are discussed in further detail below.

[0116] i. Double Stranded RNA Silencing Elements

[0117] In one embodiment, the silencing element comprises or encodes a double stranded RNA molecule. As used herein, a “double stranded RNA” or “dsRNA” refers to a polyribonucleotide structure formed either by a single self-complementary RNA molecule or a polyribonucleotide structure formed by the expression of least two distinct RNA strands. Accordingly, as used herein, the term “dsRNA” is meant to encompass other terms used to describe nucleic acid molecules that are capable of mediating RNA interference or gene silencing, including, for example, small RNA (sRNA), short-interfering RNA (siRNA), double-stranded RNA (dsRNA), micro-RNA (miRNA), hairpin RNA, short hairpin RNA (shRNA), and others. See, e.g., Meister and Tuschl (2004) Nature 431:343-349 and Bonetta et al. (2004) Nature Methods 1:79-86.

[0118] In specific embodiments, at least one strand of the duplex or double-stranded region of the dsRNA shares sufficient sequence identity or sequence complementarity to the target polynucleotide to allow for the dsRNA to reduce the level of expression of the target sequence. As used herein, the strand that is complementary to the target polynucleotide is the “antisense strand,” and the strand homologous to the target polynucleotide is the “sense strand.”

[0119] In one embodiment, the dsRNA comprises a hairpin RNA. A hairpin RNA comprises an RNA molecule that is capable of folding back onto itself to form a double stranded structure. Multiple structures can be employed as hairpin elements. For example, the hairpin RNA molecule that hybridizes with itself to form a hairpin structure can comprises a single-stranded loop region and a base-paired stem. The base-paired stem region can comprise a sense sequence corresponding to all or part of the target polynucleotide and further comprises an antisense sequence that is fully or partially complementary to the sense sequence. Thus, the base-paired stem region of the silencing element can determine the specificity of the silencing. See, e.g., Chuang and Meyerowitz (2000) Proc. Natl. Acad. Sci. USA 97:4985-4990, herein incorporated by reference. A transient assay for the efficiency of hpRNA constructs to silence gene expression in vivo has been described by Panstruga et al. (2003) Mol. Biol. Rep. 30:135-140, herein incorporated by reference.

[0120] ii. siRNA Silencing Elements

[0121] A “short interfering RNA” or “siRNA” comprises an RNA duplex (double-stranded region) and can further comprises one or two single-stranded overhangs, e.g., 3′ or 5′ overhangs. The duplex can be approximately 19 base pairs (bp) long, although lengths between 17 and 29 nucleotides, including 17, 18, 19, 20, 21, 22, 23, 24, 25, 26, 27, 28, and 29 nucleotides, can be used. An siRNA can be formed from two RNA molecules that hybridize together or can alternatively be generated from a single RNA molecule that includes a self-hybridizing portion. The duplex portion of an siRNA can include one or more bulges containing one or more unpaired and/or mismatched nucleotides in one or both strands of the duplex or can contain one or more noncomplementary nucleotide pairs. One strand of an siRNA (referred to herein as the antisense strand) includes a portion that hybridizes with a target transcript. In certain embodiments, one strand of the siRNA (the antisense strand) is precisely complementary with a region of the target transcript over at least about 17 nucleotides, 18 nucleotides, 19 nucleotides, 20 nucleotides or more meaning that the siRNA antisense strand hybridizes to the target transcript without a single mismatch (i.e., without a single noncomplementary base pair) over that length. In other embodiments, one or more mismatches between the siRNA antisense strand and the targeted portion of the target transcript can exist. In embodiments in which perfect complementarity is not achieved, any mismatches between the siRNA antisense strand and the target transcript can be located at or near 3′ end of the siRNA antisense strand. For example, in certain embodiments, nucleotides 1-9, 2-9, 2-10, and/or 1-10 of the antisense strand are perfectly complementary to the target.

[0122] Considerations for design of effective siRNA molecules are discussed in McManus et al. (2002) Nature Reviews Genetics 3: 737-747 and in Dykxhoorn et al. (2003) Nature Reviews Molecular Cell Biology 4: 457-467. Such considerations include the base composition of the siRNA, the position of the portion of the target transcript that is complementary to the antisense strand of the siRNA relative to the 5′ and 3′ ends of the transcript, and the like. A variety of computer programs also are available to assist with selection of siRNA sequences, e.g., from Ambion (web site having URL www.ambion.com), at web site having URL www.sinc.sunysb.edu/Stu/shilin/rnai.html. Additional design considerations that also can be employed are described in Semizarov et al. Proc. Natl. Acad. Sci. 100: 6347-6352.

[0123] iii. Short Hairpin RNA Silencing Elements

[0124] The term “short hairpin RNA” or “shRNA” refers to an RNA molecule comprising at least two complementary portions hybridized or capable of hybridizing to form a double-stranded (duplex) structure sufficiently long to mediate RNAi (generally between approximately 17 and 29 nucleotides in length, including 17, 18, 19, 20, 21, 22, 23, 24, 25, 26, 27, 28, and 29 nucleotides in length, and in some embodiments, typically at least 19 base pairs in length), and at least one single-stranded portion, typically between approximately 1 and 20 or 1 to 10 nucleotides in length that forms a loop connecting the two nucleotides that form the base pair at one end of the duplex portion. The duplex portion can, but does not require, one or more bulges consisting of one or more unpaired nucleotides. In specific embodiments, the shRNAs comprise a 3′ overhang. Thus, shRNAs are precursors of siRNAs and are, in general, similarly capable of inhibiting expression of a target transcript.

[0125] In particular, RNA molecules having a hairpin (stem-loop) structure can be processed intracellularly by Dicer to yield an siRNA structure referred to as short hairpin RNAs (shRNAs), which contain two complementary regions that hybridize to one another (self-hybridize) to form a double-stranded (duplex) region referred to as a stem, a single-stranded loop connecting the nucleotides that form the base pair at one end of the duplex, and optionally an overhang, e.g., a 3′ overhang. The stem can comprise about 19, 20, or 21 by long, though shorter and longer stems (e.g., up to about 29 nt) also can be used. The loop can comprise about 1-20, including 1, 2, 3, 4, 5, 6, 7, 8, 9, 10, 11, 12, 13, 14, 15, 16, 17, 18, 19, 20 nt, about 4-10, or about 6-9 nt. The overhang, if present, can comprise approximately 1-20 nt or approximately 2-10 nt. The loop can be located at either the 5′ or 3′ end of the region that is complementary to the target transcript whose inhibition is desired (i.e., the antisense portion of the shRNA).

[0126] Although shRNAs contain a single RNA molecule that self-hybridizes, it will be appreciated that the resulting duplex structure can be considered to comprise sense and antisense strands or portions relative to the target mRNA and can thus be considered to be double-stranded. It will therefore be convenient herein to refer to sense and antisense strands, or sense and antisense portions, of an shRNA, where the antisense strand or portion is that segment of the molecule that forms or is capable of forming a duplex with and is complementary to the targeted portion of the target polynucleotide, and the sense strand or portion is that segment of the molecule that forms or is capable of forming a duplex with the antisense strand or portion and is substantially identical in sequence to the targeted portion of the target transcript. In general, considerations for selection of the sequence of the antisense strand of an shRNA molecule are similar to those for selection of the sequence of the antisense strand of an siRNA molecule that targets the same transcript.

[0127] iv. MicroRNA Silencing Elements

[0128] In one embodiment, the silencing element comprises an miRNA. MicroRNAs” or “miRNAs” are regulatory agents comprising about 19 ribonucleotides which are highly efficient at inhibiting the expression of target polynucleotides. See, e.g., Saetrom et al. (2006) Oligonucleotides 16:115-144, Wang et al. (2006) Mol. Cell 22:553-60, Davis et al. (2006) Nucleic Acid Research 34:2294-304, Pasquinelli (2006) Dev. Cell 10:419-24, all of which are herein incorporated by reference. For miRNA interference, the silencing element can be designed to express a dsRNA molecule that forms a hairpin structure containing a 19-nucleotide sequence that is complementary to the target polynucleotide of interest. The miRNA can be synthetically made, or transcribed as a longer RNA which is subsequently cleaved to produce the active miRNA. Specifically, the miRNA can comprise 19 nucleotides of the sequence having homology to a target polynucleotide in sense orientation and 19 nucleotides of a corresponding antisense sequence that is complementary to the sense sequence.

[0129] It is recognized that various forms of an miRNA can be transcribed including, for example, the primary transcript (termed the “pri-miRNA”) which is processed through various nucleolytic steps to a shorter precursor miRNA (termed the “pre-miRNA”); the pre-miRNA; or the final (mature) miRNA is present in a duplex, the two strands being referred to as the miRNA (the strand that will eventually basepair with the target) and miRNA*. The pre-miRNA is a substrate for a form of dicer that removes the miRNA/miRNA* duplex from the precursor, after which, similarly to siRNAs, the duplex can be taken into the RISC complex. It has been demonstrated that miRNAs can be transgenically expressed and be effective through expression of a precursor form, rather than the entire primary form (McManus et al. (2002) RNA 8:842-50). In specific embodiments, 2-8 nucleotides of the miRNA are perfectly complementary to the target. A large number of endogenous human miRNAs have been identified. For structures of a number of endogenous miRNA precursors from various organisms, see Lagos-Quintana et al. (2003) RNA 9(2):175-9; see also Bartel (2004) Cell 116:281-297.

[0130] A miRNA or miRNA precursor can share at least about 80%, 85%, 90%, 91%. 92%, 93%, 94%, 95%, 96%, 97%, 98%, 99%, or 100% sequence complementarity with the target transcript for a stretch of at least about 15, 16, 17, 18, 19, 20, 21, 22, 23, 24, 25, 26, 27, 28, 29, or 30 nucleotides. In specific embodiments, the region of precise sequence complementarity is interrupted by a bulge. See Ruvkun (2001) Science 294: 797-799, Zeng et al. (2002) Molecular Cell 9:1-20, and Mourelatos et al. (2002) Genes Dev 16:720-728.

### V. Sequence Identity

[0131] As used herein, “sequence identity” or “identity” in the context of two polynucleotides or polypeptide sequences makes reference to the residues in the two sequences that are the same when aligned for maximum correspondence over a specified comparison window. When percentage of sequence identity is used in reference to proteins it is recognized that residue positions which are not identical often differ by conservative amino acid substitutions, where amino acid residues are substituted for other amino acid residues with similar chemical properties (e.g., charge or hydrophobicity) and therefore do not change the functional properties of the molecule. When sequences differ in conservative substitutions, the percent sequence identity may be adjusted upwards to correct for the conservative nature of the substitution. Sequences that differ by such conservative substitutions are said to have “sequence similarity” or “similarity”. Means for making this adjustment are well known to those of skill in the art. Typically this involves scoring a conservative substitution as a partial rather than a full mismatch, thereby increasing the percentage sequence identity. Thus, for example, where an identical amino acid is given a score of 1 and a non-conservative substitution is given a score of zero, a conservative substitution is given a score between zero and 1. The scoring of conservative substitutions is calculated, e.g., as implemented in the program PC/GENE (Intelligenetics, Mountain View, Calif.).

[0132] As used herein, “percentage of sequence identity” means the value determined by comparing two optimally aligned sequences over a comparison window, wherein the portion of the polynucleotide sequence in the comparison window may comprise additions or deletions (i.e., gaps) as compared to the reference sequence (which does not comprise additions or deletions) for optimal alignment of the two sequences. The percentage is calculated by determining the number of positions at which the identical nucleic acid base or amino acid residue occurs in both sequences to yield the number of matched positions, dividing the number of matched positions by the total number of positions in the window of comparison, and multiplying the result by 100 to yield the percentage of sequence identity.

[0133] Unless otherwise stated, sequence identity/similarity values provided herein refer to the value obtained using GAP Version 10 using the following parameters: % identity and % similarity for a nucleotide sequence using GAP Weight of 50 and Length Weight of 3, and the nwsgapdna.cmp scoring matrix; % identity and % similarity for an amino acid sequence using GAP Weight of 8 and Length Weight of 2, and the BLOSUM62 scoring matrix; or any equivalent program thereof. By “equivalent program” is intended any sequence comparison program that, for any two sequences in question, generates an alignment having identical nucleotide or amino acid residue matches and an identical percent sequence identity when compared to the corresponding alignment generated by GAP Version 10.

[0134] An “isolated” or “purified” polynucleotide or polypeptide or biologically active fragment or variant thereof, is substantially free of other cellular material, or culture medium when produced by recombinant techniques, or substantially free of chemical precursors or other chemicals when chemically synthesized. Preferably, an “isolated” nucleic acid is free of sequences (preferably protein encoding sequences) that naturally flank the nucleic acid (i.e., sequences located at the 5′ and 3′ ends of the nucleic acid) in the genomic DNA of the organism from which the nucleic acid is derived. For purposes of the invention, “isolated” when used to refer to nucleic acid molecules excludes isolated chromosomes. For example, in various embodiments, the isolated nucleic acid molecules can contain less than about 5 kb, 4 kb, 3 kb, 2 kb, 1 kb, 0.5 kb, or 0.1 kb of nucleotide sequences that naturally flank the nucleic acid molecule in genomic DNA of the cell from which the nucleic acid is derived.

[0135] By “fragment” is intended a portion of the polynucleotide or a portion of the amino acid sequence and hence protein encoded thereby. Fragments of a polynucleotide may encode protein fragments that retain the biological activity of the dominant negative form of the ERG polypeptide. Alternatively, fragments of a polynucleotide that comprise junction polynucleotides of an intragenic deletion of ERG are useful as, for example, probes and primers and need not encode the ERG polypeptide. Instead, such fragments and variants are able to detect an intragenic deletion in ERG that is associated with ALL. Thus, fragments of a nucleotide sequence may range from at least about 10, about 15, 20 nucleotides, about 50 nucleotides, about 75 nucleotides, about 100 nucleotides, 200 nucleotides, 300 nucleotides, 400 nucleotides, 500 nucleotides, 600 nucleotides, 700 nucleotides and up to the full-length polynucleotide employed in the invention. Methods to assay for the activity of a desired polynucleotide or polypeptide are described elsewhere herein.

[0136] “Variants” is intended to mean substantially similar sequences. For polynucleotides, a variant comprises a deletion and/or addition of one or more nucleotides at one or more internal sites within the native polynucleotide and/or a substitution of one or more nucleotides at one or more sites in the native polynucleotide. As used herein, a “native” polynucleotide or polypeptide comprises a naturally occurring nucleotide sequence or amino acid sequence, respectively. For polynucleotides, conservative variants include those sequences that, because of the degeneracy of the genetic code, encode the amino acid sequence of one of the polypeptides employed in the invention. Variant polynucleotides also include synthetically derived polynucleotide, such as those generated, for example, by using site-directed mutagenesis, but continue to retain the desired activity. Generally, variants of a particular polynucleotide of the invention having the desired activity will have at least about 40%, 45%, 50%, 55%, 60%, 65%, 70%, 75%, 80%, 85%, 90%, 91%, 92%, 93%, 94%, 95%, 96%, 97%, 98%, 99% or more sequence identity to that particular polynucleotide as determined by sequence alignment programs and parameters described elsewhere herein.

[0137] Variants of a particular polynucleotide of the invention (i.e., the reference polynucleotide) can also be evaluated by comparison of the percent sequence identity between the polypeptide encoded by a variant polynucleotide and the polypeptide encoded by the reference polynucleotide. Percent sequence identity between any two polypeptides can be calculated using sequence alignment programs and parameters described elsewhere herein. Where any given pair of polynucleotides employed in the invention is evaluated by comparison of the percent sequence identity shared by the two polypeptides they encode, the percent sequence identity between the two encoded polypeptides is at least about 40%, 45%, 50%, 55%, 60%, 65%, 70%, 75%, 80%, 85%, 90%, 91%, 92%, 93%, 94%, 95%, 96%, 97%, 98%, 99% or more sequence identity.

[0138] “Variant” protein is intended to mean a protein derived from the subject polypeptide by deletion or addition of one or more amino acids at one or more internal sites in the native protein and/or substitution of one or more amino acids at one or more sites in the native protein. Variant proteins encompassed by the present invention are biologically active, that is they continue to possess the desired biological activity of protein, as discussed elsewhere herein. Such variants may result from, for example, genetic polymorphism or from human manipulation. Biologically active variants of a native protein will have at least about 40%, 45%, 50%, 55%, 60%, 65%, 70%, 75%, 80%, 85%, 90%, 91%, 92%, 93%, 94%, 95%, 96%, 97%, 98%, 99% or more sequence identity to the amino acid sequence for the native protein as determined by sequence alignment programs and parameters described elsewhere herein. A biologically active variant of a protein of the invention may differ from that protein by as few as 1-15 amino acid residues, as few as 1-10, such as 6-10, as few as 5, as few as 4, 3, 2, or even 1 amino acid residue.

[0139] In addition to the various ERG polynucleotides comprising the junctions of the intragenic deletion as shown in SEQ ID NOS:4, 5, 6, 7, 8, 9, 10, 11, 12, 13, 14, 19, 21, or 22 it will be appreciated by those skilled in the art that DNA sequence polymorphisms may exist within a population (e.g., the human population). Such genetic polymorphism in a polynucleotide comprising the junction of the intragenic deletion of ERG may exist among individuals within a population due to natural allelic variation. An allele is one of a group of genes that occur alternatively at a given genetic locus.

### VI. Expression Cassettes and Host Cells

[0140] An expression cassette comprises one or more regulatory sequences, selected on the basis of the cells to be used for expression, operably linked to the desired polynucleotide. “Operably linked” is intended to mean that the desired polynucleotide (i.e., a DNA encoding a silencing element, DNA encoding a polypeptide that increases homologous recombination activity, DNA that encodes a sequence that decreases non-homologous recombination, selectable markers, etc.) is linked to the regulatory sequence(s) in a manner that allows for expression of the nucleotide sequence (e.g., in an in vitro transcription/translation system or in a cell when the expression cassette or vector is introduced into a cell). “Regulatory sequences” include promoters, enhancers, and other expression control elements (e.g., polyadenylation signals). See, for example, Goeddel (1990) in Gene Expression Technology: Methods in Enzymology 185 (Academic Press, San Diego, Calif.). Regulatory sequences include those that direct constitutive expression of a nucleotide sequence in many types of host cells, those that direct expression of the nucleotide sequence only in certain host cells (e.g., tissue-specific regulatory sequences), or those that direct expression of the polynucleotide in the presence of an appropriate inducer (inducible promoter). It will be appreciated by those skilled in the art that the design of the expression cassette can depend on such factors as the choice of the host cell to be transformed, the level of expression of the polynucleotide that is desired, and the like. Such expression cassettes typically include one or more appropriately positioned sites for restriction enzymes, to facilitate introduction of the nucleic acid into a vector.

[0141] It will further be appreciated that appropriate promoter and/or regulatory elements can readily be selected to allow expression of the relevant transcription units in the cell of interest. In certain embodiments, the promoter utilized to direct intracellular expression of a silencing element is a promoter for RNA polymerase III (Pol III). References discussing various Pol III promoters, include, for example, Yu et al. (2002) Proc. Natl. Acad. Sci. 99(9), 6047-6052; Sui et al. (2002) Proc. Natl. Acad. Sci. 99(8), 5515-5520 (2002); Paddison et al. (2002) Genes and Dev. 16, 948-958; Brummelkamp et al. (2002) Science 296, 550-553; Miyagashi (2002) Biotech. 20, 497-500; Paul et al. (2002) Nat. Biotech. 20, 505-508; Tuschl et al. (2002) Nat. Biotech. 20, 446-448. According to other embodiments, a promoter for RNA polymerase I, e.g., a tRNA promoter, can be used. See McCown et al. (2003) Virology 313(2):514-24; Kawasaki (2003) Nucleic Acids Res. 31 (2):700-7.

[0142] The regulatory sequences can also be provided by viral regulatory elements. For example, commonly used promoters are derived from polyoma, Adenovirus 2, cytomegalovirus, and Simian Virus 40. For other suitable expression systems for both prokaryotic and eukaryotic cells, see Chapters 16 and 17 of Sambrook et al. (1989) Molecular Cloning: A Laboratory Manual (2d ed., Cold Spring Harbor Laboratory Press, Plainview, N.Y.). See, Goeddel (1990) in Gene Expression Technology: Methods in Enzymology 185 (Academic Press, San Diego, Calif.).

[0143] Various constitutive promoters are known. For example, in various embodiments, the human cytomegalovirus (CMV) immediate early gene promoter, the SV40 early promoter, the Rous sarcoma virus long terminal repeat, rat insulin promoter and glyceraldehyde-3-phosphate dehydrogenase can be used to obtain high-level expression of the coding sequence of interest. The use of other viral or mammalian cellular or bacterial phage promoters which are well-known in the art to achieve expression of a coding sequence of interest. Promoters which may be used include, but are not limited to, the long terminal repeat as described in Squinto et al. (1991) Cell 65:1 20); the SV40 early promoter region (Bernoist and Chambon (1981) Nature 290:304 310), the CMV promoter, the M-MuLV 5′ terminal repeat the promoter contained in the 3′ long terminal repeat of Rous sarcoma virus (Yamamoto et al. (1980) Cell 22:787 797), the herpes thymidine kinase promoter (Wagner et al. (1981) Proc. Natl. Acad. Sci. U.S.A. 78:144 1445), the regulatory sequences of the metallothionine gene (Brinster et al. (1982) Nature 296:39 42); the following animal transcriptional control regions, which exhibit tissue specificity and have been utilized in transgenic animals: elastase I gene control region which is active in pancreatic acinar cells (Swift et al. (1984) Cell 38:639 646; Ornitz et al. (1986) Cold Spring Harbor Symp. Quant. Biol. 50:399 409; MacDonald, 1987, Hepatology Z:425 515); insulin gene control region which is active in pancreatic beta cells (Hanahan (1985) Nature 315:115 122), immunoglobulin gene control region which is active in lymphoid cells (Grosschedl et al. (1984) Cell 38:647 658; Adames et al (1985) Nature 318:533 538; Alexander et al. (1987) Mol. Cell. Biol. 7:1436 1444), mouse mammary tumor virus control region which is active in testicular, breast, lymphoid and mast cells (Leder et al. (1986) Cell 45:485 495).

[0144] Inducible promoters are also known. Non-limiting examples of inducible promoters and their inducer inlcude MT II/Phorbol Ester (TPA) (Palmiter et al. (1982) Nature 300:611) and heavy metals (Haslinger and Karin (1985) Proc. Nat'l Acad. Sci. USA. 82:8572; Searle et al. (1985) Mol. Cell. Biol. 5:1480; Stuart et al. (1985) Nature 317:828; Imagawa et al. (1987) Cell 51:251; Karin et al. (1987) Mol. Cell Biol. 7:606; Angel et al. (1987) Cell 49:729; McNeall et al. (1989) Gene 76:8); MMTV (mouse mammary tumor virus)/Glucocorticoids (Huang et al. (1981) Cell 27:245; Lee et al. (1981) Nature 294:228; Majors and Varmus (1983) Proc. Nat'l Acad. Sci. USA. 80:5866; Chandler et al. (1983) Cell 33:489; Ponta et al. (1985) Proc. Nat'l Acad. Sci. USA. 82:1020; Sakai et al. (1988) Genes and Dev. 2:1144); β-Interferon/poly(rI)X and poly(rc) (Tavernier et al. (1983) Nature 301:634); Adenovirus 5 E2/E1A (Imperiale and Nevins (1984) Mol. Cell. Biol. 4:875); c-jun/Phorbol Ester (TPA), H₂O₂; Collagenase/Phorbol Ester (TPA) (Angel et al. (1987) Mol. Cell. Biol. 7:2256); Stromelysin/Phorbol Ester (TPA), IL-1 (Angel et al. (1987) Cell 49:729); SV40/Phorbol Ester (TPA) (Angel et al. (1987) Cell 49:729); Murine MX Gene/Interferon, Newcastle Disease Virus; GRP78 Gene/A23187 (Resendez Jr. et al. (1988) Mol. Cell. Biol. 8:4579); α-2-Macroglobulin/IL-6; Vimentin/Serum (Kunz et al. (1989) Nucl. Acids Res. 17:1121); MHC Class I Gene H-2 kB/Interferon (Blanar et al. (1989) EMBO J. 8:1139); HSP70/Ela, SV40 Large T Antigen (Taylor and Kingston (1990) Mol. Cell. Biol. 10:165; Taylor and Kingston (1990) Mol. Cell. Biol. 10:176; Taylor et al. (1989) J. Biol. Chem. 264:15160); Proliferin/Phorbol Ester-TPA (Mordacq and Linzer (1989) Genes and Dev. 3:760); Tumor Necrosis Factor/PMA (Hensel et al. (1989) Lymphokine Res. 8:347); Thyroid Stimulating Hormone a Gene/Thyroid Hormone (Chatterjee et al. (1989) Proc. Nat'l Acad. Sci. USA. 86:9114); and, Insulin E Box/Glucose.

[0145] Such expression cassettes can be contained in a vector which allow for the introduction of the expression cassette into a cell. In specific embodiments, the vector allows for autonomous replication of the expression cassette in a cell or may be integrated into the genome of a cell. Such vectors are replicated along with the host genome (e.g., nonepisomal mammalian vectors). In general, expression vectors of utility in recombinant DNA techniques are often in the form of plasmids (vectors). However, the invention is intended to include such other forms of expression vectors, such as viral vectors (e.g., replication defective retroviruses, adenoviruses, and adeno-associated viruses). See, for example, U.S. Publication 2005214851, herein incorporated by reference.

[0146] Any expression cassette can further comprise a selection marker. As used herein, the term “selection marker” comprises any polynucleotide, which when expressed in a cell allows for the selection of the transformed cell with the vector. For example, a selection marker can confer resistance to a drug, a nutritional requirement, or a cytotoxic drug. A selection marker can also induce a selectable phenotype such as fluorescence or a color deposit. A “positive selection marker” allows a cell expressing the marker to survive against a selective agent and thus confers a positive selection characteristic onto the cell expressing that marker. Positive selection marker/agents include, for example, Neo/G418, Neo/Kanamycin, Hyg/Hygromycin, hisD/Histidinol, Gpt/Xanthine, Ble/Bleomycin, HPRT/Hypoxanthine. Other positive selection markers include DNA sequences encoding membrane bound polypeptides. Such polypeptides are well known to those skilled in the art and can comprise, for example, a secretory sequence, an extracellular domain, a transmembrane domain and an intracellular domain. When expressed as a positive selection marker, such polypeptides associate with the cell membrane. Fluorescently labeled antibodies specific for the extracellular domain may then be used in a fluorescence activated cell sorter (FACS) to select for cells expressing the membrane bound polypeptide. FACS selection may occur before or after negative selection.

[0147] A “negative selection marker” allows the cell expressing the marker to not survive against a selective agent and thus confers a negative selection characteristic onto the cell expressing the marker. Negative selection marker/agents include, for example, HSV-tk/Acyclovir or Gancyclovir or FIAU, Hprt/6-thioguanine, Gpt/6-thioxanthine, cytosine deaminase/5-fluoro-cytosine, diphtheria toxin or the ricin toxin. See, for example, U.S. Pat. No. 5,464,764, herein incorporated by reference.

[0148] In preparing an expression cassette or a homologous recombination cassette, the various DNA fragments may be manipulated, so as to provide for the DNA sequences in the proper orientation and, as appropriate, in the proper reading frame. Toward this end, adapters or linkers may be employed to join the DNA fragments or other manipulations may be involved to provide for convenient restriction sites, removal of superfluous DNA, removal of restriction sites, or the like. For this purpose, in vitro mutagenesis, primer repair, restriction, annealing, resubstitutions, e.g., transitions and transversions, may be involved.

[0149] As used herein, “heterologous” in reference to a sequence is a sequence that originates from a foreign species, or, if from the same species, is substantially modified from its native form in composition and/or genomic locus by deliberate human intervention. For example, a promoter operably linked to a heterologous polynucleotide is from a species different from the species from which the polynucleotide was derived, or, if from the same/analogous species, one or both are substantially modified from their original form and/or genomic locus, or the promoter is not the native promoter for the operably linked polynucleotide.

[0150] The host cells of the invention can also be used to produce nonhuman transgenic animals. For example, in one embodiment, a host cell of the invention is a fertilized oocyte or an embryonic stem cell into which a sequence encoding a C-terminal domain deleted ERG polypeptide or a silencing element of the invention has been introduced. Such host cells can then be used to create nonhuman transgenic animals in which exogenous sequences encoding a C-terminal domain deleted ERG polypeptide, a polynucleotide comprising an ERG intragenic deletion, or a polynucleotide expressing a silencing element of the invention have been introduced into their genome or homologous recombinant animals. In specific embodiments, the endogenous ERG sequences have been altered to produce a C-terminal domain deleted ERG polypeptide or to disrupt expression of the entire ERG polypeptide expressed from the ERG intragenic deletion. Such animals are useful for studying the function and/or activity of ERG alleles having intragenic deletions associated with the novel subtype of B-progenitor ALL or encoding C-terminal domain deleted ERG proteins and for identifying and/or evaluating modulators of the activity of the C-terminal domain deleted ERG polypeptide.

[0151] As used herein, a “transgenic animal” is a nonhuman animal, in specific embodiments a mammal, a rodent such as a rat or mouse, in which one or more of the cells of the animal includes a transgene. Other examples of transgenic animals include nonhuman primates, sheep, dogs, cows, goats, chickens, amphibians, etc. A transgene is exogenous DNA that is integrated into the genome of a cell from which a transgenic animal develops and which remains in the genome of the mature animal, thereby directing the expression of an encoded gene product in one or more cell types or tissues of the transgenic animal As used herein, a “homologous recombinant animal” is a nonhuman animal, in specific embodiments a mammal, in other embodiments a mouse, in which an endogenous ERG gene has been altered by homologous recombination between the endogenous gene and an exogenous DNA molecule introduced into a cell of the animal, e.g., an embryonic cell of the animal, prior to development of the animal

[0152] A transgenic animal of the invention can be created by introducing a C-terminal domain deleted ERG polypeptide encoding nucleic acid, a polynucleotide comprising an ERG intragenic deletion, or a polynucleotide expressing a silencing element of the invention into the male pronuclei of a fertilized oocyte, e.g., by microinjection, retroviral infection, and allowing the oocyte to develop in a pseudopregnant female foster animal. Such sequences can be introduced as a transgene into the genome of a nonhuman animal Alternatively, a homologue of the ERG gene can be isolated based on hybridization and used as a transgene. Intronic sequences and polyadenylation signals can also be included in the transgene to increase the efficiency of expression of the transgene. A tissue-specific regulatory sequence(s) can be operably linked to the transgene to direct expression of the sequence particular cells. Methods for generating transgenic animals via embryo manipulation and microinjection, particularly animals such as mice, have become conventional in the art and are described, for example, in U.S. Pat. Nos. 4,736,866, 4,870,009, and 4,873,191 and in Hogan (1986) Manipulating the Mouse Embryo (Cold Spring Harbor Laboratory Press, Cold Spring Harbor, N.Y., 1986). Similar methods are used for production of other transgenic animals. A transgenic founder animal can be identified based upon the presence of the C-terminal domain deleted ERG protein, the polynucleotide comprising and ERG intragenic deletion, or the polynucleotide expressing a silencing element of the invention in its genome and/or expression of mRNA of such sequences in tissues or cells of the animals. A transgenic founder animal can then be used to breed additional animals carrying the transgene. Moreover, transgenic animals carrying a transgene can further be bred to other transgenic animals carrying other transgenes.

[0153] To create a homologous recombinant animal, one prepares a vector containing at least a portion of a sequence encoding a C-terminal domain deleted ERG polypeptide or a homolog of the gene into which a deletion has been introduced to thereby allow for the expression of a C-terminal domain deleted ERG polypeptide. In one embodiment, the homologous recombination vector, the altered portion of the ERG gene is flanked at its 5′ and 3′ ends by additional nucleic acid of the ERG gene to allow for homologous recombination to occur between the exogenous ERG gene carried by the vector and an endogenous ERG gene in an embryonic stem cell. The additional flanking ERG nucleic acid is of sufficient length for successful homologous recombination with the endogenous gene. Typically, several kilobases of flanking DNA (at both the 5′ and 3′ ends) are included in the vector (see, e.g., Thomas and Capecchi (1987) Cell 51:503 for a description of homologous recombination vectors). The vector is introduced into an embryonic stem cell line (e.g., by electroporation), and cells in which the introduced ERG gene has homologously recombined with the endogenous ERG gene are selected (see, e.g., Li et al. (1992) Cell 69:915). The selected cells are then injected into a blastocyst of an animal (e.g., a mouse) to form aggregation chimeras (see, e.g., Bradley (1987) in Teratocarcinomas and Embryonic Stem Cells: A Practical Approach, ed. Robertson (IRL, Oxford pp. 113-152). A chimeric embryo can then be implanted into a suitable pseudopregnant female foster animal and the embryo brought to term. Progeny harboring the homologously recombined DNA in their germ cells can be used to breed animals in which all cells of the animal contain the homologously recombined DNA by germline transmission of the transgene. Methods for constructing homologous recombination vectors and homologous recombinant animals are described further in Bradley (1991) Current Opinion in Bio/Technology 2:823-829 and in PCT Publication Nos. WO 90/11354, WO 91/01140, WO 92/0968, and WO 93/04169.

[0154] In another embodiment, transgenic nonhuman animals containing selected systems that allow for regulated expression of the transgene can be produced. One example of such a system is the cre/loxP recombinase system of bacteriophage P1. For a description of the cre/loxP recombinase system, see, e.g., Lakso et al. (1992) Proc. Natl. Acad. Sci. USA 89:6232-6236. Another example of a recombinase system is the FLP recombinase system of Saccharomyces cerevisiae (O'Gorman et al. (1991) Science 251:1351-1355). If a cre/loxP recombinase system is used to regulate expression of the transgene, animals containing transgenes encoding both the Cre recombinase and a selected protein are required. Such animals can be provided through the construction of “double” transgenic animals, e.g., by mating two transgenic animals, one containing a transgene encoding a selected protein and the other containing a transgene encoding a recombinase.

[0155] Clones of the nonhuman transgenic animals described herein can also be produced according to the methods described in Wilmut et al. (1997) Nature 385:810-813 and PCT Publication Nos. WO 97/07668 and WO 97/07669.

### VII. Antibodies

[0156] The present invention further provides antibodies specific to epitopes of the C-terminal domain deleted ERG polypeptide and methods of detecting the C-terminal domain deleted ERG polypeptide, or any combination thereof that rely on the ability of these antibodies to selectively bind to specific portions of the C-terminal domain deleted ERG polypeptide that are unique to that truncated polypeptide. Such antibodies do not bind preferentially to the native or full length ERG polypeptide.

[0157] Thus, the C-terminal domain deleted ERG polypeptides of the present invention, including fragments thereof, may be used as immunogens to produce antibodies having use in the diagnostic, research, and therapeutic methods described below. The antibodies may be polyclonal or monoclonal, chimeric, humanized, single chain or Fab fragments. Various procedures known to those of ordinary skill in the art may be used for the production and labeling of such antibodies and fragments. See, e.g., Burns, ed., Immunochemical Protocols, 3.sup.rd ed., Humana Press (2005); Harlow and Lane, Antibodies: A Laboratory Manual, Cold Spring Harbor Laboratory (1988); Kozbor et al., Immunology Today 4: 72 (1983); Kohler and Milstein, Nature 256: 495 (1975). Antibodies or fragments exploiting the differences between the C-terminal domain deleted ERG polypeptide and the native or full length ERG polypeptide are particularly preferred.

[0158] As discussed elsewhere herein, methods are provided for detecting the presence of the C-terminal domain deleted ERG polypeptide. Such antibodies can be used to detect the presence of the fusion protein in samples from human cells. The methods of the invention involve the use of antibodies that bind to a C-terminal domain deleted ERG polypeptide and antibody detection systems that are known to those of ordinary skill in the art. Such methods find use in diagnosis and treatment of ALL, for example, to determine if particular cells or tissues express the C-terminal domain deleted ERG polypeptide.

[0159] Conditions for incubating an antibody with a test sample vary depending on the format employed for the assay, the detection methods employed, the nature of the test sample, and the type and nature of the antibody used in the assay. One skilled in the art will recognize that any one of the commonly available immunological assay formats (such as radioimmunoassays, enzyme-linked immunosorbent assays, diffusion based ouchterlony, or rocket inmunofluorescent assays) can readily be adapted to employ the antibodies of the present invention. Examples of such assays can be found in Chard, T., An Introduction to Radioimmunoassay and Related Techniques, Elsevier Science Publishers, Amsterdam, The Netherlands (1986); Bullock, G. R. et al., Techniques in Immunocytochemistry, Academic Press, Orlando, Fla. Vol. 1 (1982), Vol. 2 (1983), Vol. 3 (1985); Tijssen, P., Practice and Theory of Enzyme Immunoassays: Laboratory Techniques in Biochemistry and Molecular Biology, Elsevier Science Publishers, Amsterdam, The Netherlands (1985).

[0160] In another embodiment of the immunoassays of the invention, the anti-N-terminal domain deleted ERG polypeptide antibody is immobilized on a solid support. Examples of such solid supports include, but are not limited to, plastics such as polycarbonate, complex carbohydrates such as agarose and sepharose, and acrylic resins, such as polyacrylamide and latex beads. Techniques for coupling antibodies to such solid supports are well known in the art (see, for example, Weir, D. M. et al., Handbook of Experimental Immunology, 4th Ed., Blackwell Scientific Publications, Oxford, England, Chapter 10 (1986)).

[0161] Additionally, one or more of the antibodies used in the above described methods can be detectably labeled prior to use. Antibodies can be detectably labeled through the use of radioisotopes, affinity labels (such as biotin, avidin, etc.), enzymatic labels (such as horse radish peroxidase, alkaline phosphatase, etc.) fluorescent labels (such as FITC or rhodamine, etc.), paramagnetic atoms, etc. Procedures for accomplishing such labeling are well-known in the art; see, for example, Sternberger, L. A. et al., J. Histochem. Cytochem. 18:315-333 (1970); Bayer, E. A. et al., Meth. Enzym. 62:308-315 (1979); Engrall, E. et al., J. Immunol. 109:129-135 (1972); Goding, J. W., J. Immunol. Meth. 13:215-226 (1976).

### VIII. Pharmaceutical Compositions

[0162] The methods and compositions of the invention find use in the treatment or prevention of leukemia, more specifically, to the treatment or prevention of the novel subtype of B-progenitor ALL. Such methods comprise the administration of an agent that blocks the activity or the level of expression of a C-terminal domain truncated ERG polypeptide.

[0163] The therapeutic agent may further comprise an inorganic or organic, solid or liquid, pharmaceutically acceptable carrier. The carrier may also contain preservatives, wetting agents, emulsifiers, solubilizing agents, stabilizing agents, buffers, solvents and salts. Compositions may be sterilized and exist as solids, particulates or powders, solutions, suspensions or emulsions.

[0164] The therapeutic agent can be formulated according to known methods to prepare pharmaceutically useful compositions, such as by admixture with a pharmaceutically acceptable carrier vehicle. Suitable vehicles and their formulation are described, for example, in Remington's Pharmaceutical Sciences (16th ed., Osol, A. (ed.), Mack, Easton Pa. (1980)). In order to form a pharmaceutically acceptable composition suitable for effective administration, such compositions will contain an effective amount of the therapeutic agent, either alone, or with a suitable amount of carrier vehicle.

[0165] The pharmaceutically acceptable carrier will vary depending on the method of administration and the intended method of use. The pharmaceutical carrier employed may be, for example, either a solid, liquid, or time release. Representative solid carriers are lactose, terra alba, sucrose, talc, gelatin, agar, pectin, acacia, magnesium stearate, stearic acid, microcrystalin cellulose, polymer hydrogels, and the like. Typical liquid carriers include syrup, peanut oil, olive oil, cyclodextrin, and the like emulsions. Those skilled in the art are familiar with appropriate carriers for each of the commonly utilized methods of administration. Furthermore, it is recognized that the total amount of the therapeutic agent administered will depend on both the pharmaceutical composition being administered (i.e., the carrier being used), the mode of administration, binding activity and the desired effect (i.e., a method of detecting, a method of modulating, or a method of delivering a therapeutic agent).

[0166] Once the pharmaceutical composition has been formulated, it may be stored in sterile vials as a solution, suspension, gel, emulsion, solid, or dehydrated or lyophilized powder. Such formulations may be stored either in a ready to use form or requiring reconstitution immediately prior to administration.

[0167] The therapeutic agent also can be delivered locally to the appropriate cells, tissues or organ system by using a catheter or syringe. Other means of delivering such therapeutic agents locally to cells include using infusion pumps (for example, from Alza Corporation, Palo Alto, Calif.) or incorporating the therapeutic agent into polymeric implants (see, for example, Johnson eds. (1987) Drug Delivery Systems (Chichester, England: Ellis Horwood Ltd.), which can affect a sustained release of the therapeutic agent to the immediate area of the implant.

[0168] A variety of methods are available for delivering a therapeutic agent to a subject (i.e., an animal (mammal), tissue, organ, or cell). The manner of administering therapeutic agents for systemic delivery may be via subcutaneous, ID, intramuscular, intravenous, or intranasal. In addition inhalant mists, orally active formulations, transdermal iontophoresis or suppositories, are also envisioned. One carrier is physiological saline solution, but it is contemplated that other pharmaceutically acceptable carriers may also be used. In one embodiment, it is envisioned that the carrier and the therapeutic agent constitute a physiologically-compatible, slow release formulation. The primary solvent in such a carrier may be either aqueous or non-aqueous in nature. In addition, the carrier may contain other pharmacologically-acceptable excipients for modifying or maintaining the pH, osmolarity, viscosity, clarity, color, sterility, stability, rate of dissolution, or odor of the formulation. Similarly, the carrier may contain still other pharmacologically-acceptable excipients for modifying or maintaining the stability, rate of dissolution, release, or absorption of the therapeutic agent. Such excipients are those substances usually and customarily employed to formulate dosages for parental administration in either unit dose or multi-dose form.

[0169] For example, in general, the disclosed therapeutic agent can be incorporated within or on microparticles or liposomes. Microparticles or liposomes containing the disclosed therapeutic agent can be administered systemically, for example, by intravenous or intraperitoneal administration, in an amount effective for delivery of the therapeutic agent to targeted cells. Other possible routes include trans-dermal or oral administration, when used in conjunction with appropriate microparticles. Generally, the total amount of the liposome-associated therapeutic agent administered to an individual will be less than the amount of the unassociated therapeutic agent that must be administered for the same desired or intended effect.

[0170] By “ effective amount” is meant the concentration of a therapeutic agent that is sufficient to elicit a desired effect (i.e., the treatment or prevention of leukemia).

[0171] Thus, the concentration of a therapeutic agent in an administered dose unit in accordance with the present invention is effective to produce the desired effect. The effective amount will depend on many factors including, for example, the responsiveness of the subject, the weight of the subject along with other intrasubject variability, the method of administration, and the formulation used. Methods to determine efficacy, dosage, Ka, and route of administration are known to those skilled in the art.

[0172] Thus the present invention also provides pharmaceutical formulations or compositions, both for veterinary and for human medical use, which comprise the therapeutic agent with one or more pharmaceutically acceptable carriers thereof and optionally any other therapeutic ingredients. The carrier(s) must be pharmaceutically acceptable in the sense of being compatible with the other ingredients of the formulation and not unduly deleterious to the recipient thereof.

[0173] The compositions include those suitable for oral, rectal, topical, nasal, ophthalmic, or parenteral (including intraperitoneal, intravenous, subcutaneous, or intramuscular injection) administration. The compositions may conveniently be presented in unit dosage form and may be prepared by any of the methods well known in the art of pharmacy. All methods include the step of bringing the active agent into association with a carrier that constitutes one or more accessory ingredients. In general, the compositions are prepared by uniformly and intimately bringing the active compound into association with a liquid carrier, a finely divided solid carrier or both, and then, if necessary, shaping the product into desired formulations.

[0174] Compositions of the present invention suitable for oral administration may be presented as discrete units such as capsules, cachets, tablets, lozenges, and the like, each containing a predetermined amount of the active agent as a powder or granules; or a suspension in an aqueous liquor or non-aqueous liquid such as a syrup, an elixir, an emulsion, a draught, and the like.

[0175] A syrup may be made by adding the active compound to a concentrated aqueous solution of a sugar, for example sucrose, to which may also be added any accessory ingredient(s). Such accessory ingredients may include flavorings, suitable preservatives, an agent to retard crystallization of the sugar, and an agent to increase the solubility of any other ingredient, such as polyhydric alcohol, for example, glycerol or sorbitol.

[0176] Formulations suitable for parental administration conveniently comprise a sterile aqueous preparation of the active compound, which can be isotonic with the blood of the recipient.

[0177] Nasal spray formulations comprise purified aqueous solutions of the active agent with preservative agents and isotonic agents. Such formulations are preferably adjusted to a pH and isotonic state compatible with the nasal mucous membranes.

[0178] Formulations for rectal administration may be presented as a suppository with a suitable carrier such as cocoa butter, or hydrogenated fats or hydrogenated fatty carboxylic acids.

[0179] Ophthalmic formulations are prepared by a similar method to the nasal spray, except that the pH and isotonic factors are preferably adjusted to match that of the eye.

[0180] Topical formulations comprise the active compound dissolved or suspended in one or more media such as mineral oil, petroleum, polyhydroxy alcohols or other bases used for topical formulations. The addition of other accessory ingredients as noted above may be desirable.

[0181] Further, the present invention provides liposomal formulations of the therapeutic agent. The technology for forming liposomal suspensions is well known in the art. When the therapeutic agent is an aqueous-soluble salt, using conventional liposome technology, the same may be incorporated into lipid vesicles. In such an instance, due to the water solubility of the compound, the compound will be substantially entrained within the hydrophilic center or core of the liposomes. The lipid layer employed may be of any conventional composition and may either contain cholesterol or may be cholesterol-free. When the compound or salt of interest is water-insoluble, again employing conventional liposome formation technology, the salt may be substantially entrained within the hydrophobic lipid bilayer that forms the structure of the liposome. In either instance, the liposomes that are produced may be reduced in size, as through the use of standard sonication and homogenization techniques. The liposomal formulations containing the progesterone metabolite or salts thereof, may be lyophilized to produce a lyophilizate which may be reconstituted with a pharmaceutically acceptable carrier, such as water, to regenerate a liposomal suspension.

[0182] Pharmaceutical formulations are also provided which are suitable for administration as an aerosol, by inhalation. These formulations comprise a solution or suspension of the desired therapeutic agent or a plurality of solid particles of the compound or salt. The desired formulation may be placed in a small chamber and nebulized. Nebulization may be accomplished by compressed air or by ultrasonic energy to form a plurality of liquid droplets or solid particles comprising the compounds or salts.

[0183] In addition to the aforementioned ingredients, the compositions of the invention may further include one or more accessory ingredient(s) selected from the group consisting of diluents, buffers, flavoring agents, binders, disintegrants, surface active agents, thickeners, lubricants, preservatives (including antioxidants) and the like.

[0184] The following examples are offered by way of illustration and not by way of limitation.

### Experimental

[0185] ERG Deletions define a Novel Subtype of B-Progenitor Acute Lymphoblastic Leukemia

[0186] In a previous gene expression profiling study of acute lymphoblastic leukemia (ALL), a novel subtype of B-progenitor ALL (4.9% of 284 cases) with a unique gene expression profile, aberrant expression of CD2 and the absence of recurring cytogenetic abnormalities was identified (Yeoh et al. (2002) Cancer Cell 1:133). Efforts to identify rearrangement or mutation of many of the top-ranked genes in the novel expression signature, including PDGFRA, PTPRM, BRDG1, LHFPL2, and CHST2 failed to identify a causative lesion. To further investigate the genetic basis of this subtype, we have performed integrated genomic analysis of 277 ALL cases. Affymetrix Mapping 250 k Sty and Nsp single nucleotide polymorphism microarrays were used in all cases, and Affymetric U133A gene expression profiles were obtained on 183 of the cases. Unsupervised clustering of gene expression data identified 16 cases of the novel subtype in this expanded patient cohort, included all of the 14 cases previously reported in the study of Yeoh et al. (2002) Cancer Cell 1:133. Remarkably, focal mono-allelic deletions of the ETS family member ERG (v-ets erythroblastosis virus E26 oncogene homolog) were detected by genome-wide copy number analysis in 12/16 (75%) of the novel cases, but not in any other ALL subtype. An extensive analysis failed to reveal any evidence of translocations involving the altered ERG allele, indicating that these are intragenic deletions limited exclusively to ERG. The presence and extent of the deletions was confirmed by genomic quantitative PCR. The ERG deletions involved a subset of internal exons (most commonly genomic ERG exons 6-10 or 6-12) and resulted in the expression of internally deleted ERG transcripts with altered reading frames that are predicted to produce a prematurely truncated N-terminal protein fragment; however, using an alternative translational start site 5′ to exon 13, the transcripts should also encode a ˜28 kDa C-terminal ERG fragment that contains the entire C-terminal ETS DNA-binding and transactivation domains, but lacks all N-terminal domains. Importantly, western blot analysis of primary leukemic blasts revealed expression of only the 28 kDa C-terminal ERG protein, along with full length ERG expressed from the retained wild type allele. Remarkably, the C-terminal ERG protein was also detected in 3 of 4 novel ALL cases that lacked detectable ERG deletions, but not in any other ALL subtype. In luciferase reporter assays, the aberrant ERG protein acted as a competitive (dominant negative) inhibitor of wild type ERG. Analysis of a second cohort of 35 additional B-progenitor ALL cases lacking recurring cytogenetic abnormalities identified two cases with ERG deletions and a third expressing the aberrant ERG protein, all of which had the novel gene expression profile. Notably, resequencing of ERG in 252 ALL cases identified only one case with an ERG mutation that resulted in a frameshift in the ETS domain. This case did not share the novel signature nor express the aberrant C-terminal ERG protein. Importantly, this case harbored three copies of chromosome 21, and thus had two normal copies of the ERG gene. Furthermore, in contrast to the deletional forms of ERG observed in novel ALL, the sequence mutation in this case is predicted to result in loss of the C-terminal ERG domains, and so is predicted to be hypomorphic, and not act as a competitive (dominant negative) inhibitor of normal ERG. Finally, in an analysis of 37 acute leukemia cell lines, the B-progenitor ALL line NALM-6 was found to harbor a focal, internally truncating ERG deletion, expressed the aberrant ERG protein, and shared the novel gene expression profile, thus identifying it as a model of this novel ALL subtype. These data establish focal ERG deletions as the genetic lesion underlying a novel subtype of ALL, and have expanded the genetic mechanisms that lead to the dysregulation of ERG transcriptional activity from chromosomal translocations that result in enhanced transcriptional activity (e.g. TMPRSS2-ERG observed in carcinoma of the prostate), to deletions that generate dominant negative forms of the transcriptional factor.

TABLE 1
Summary of SEQ ID NOS.

| SEQ ID NO | Type | Description |
|---|---|---|
| 1 | Genomic | Genomic DNA comprising the wild-type ERG gene. |
| | DNA | |
| 2 | cDNA | cDNA of ERG1 isoform |
| 3 | cDNA | cDNA of ERG2 isoform |
| 4 | cDNA | ERGΔexon 6-10 |
| 5 | cDNA | ERGΔexon 6-12 |
| 6 | cDNA | ERGΔexon 6-13 |
| 7 | cDNA | junction of the intragenic deletion of exons 6-10 of |
| | | the ERGΔexon 6-10 cDNA (20 nucleotides 5′ and 20 |
| | | nucleotides 3′ of the junction.) |
| 8 | cDNA | junction of the intragenic deletion of exons 6-10 of |
| | | the ERGΔexon 6-10 cDNA (50 nucleotides 5′ and 50 |
| | | nucleotides 3′ of the junction.) |
| 9 | cDNA | junction of the intragenic deletion of exons 6-10 of |
| | | ERGΔexon 6-10 cDNA (100 nucleotides 5′ and 100 |
| | | nucleotides 3′ of the junction.) |
| 10 | cDNA | junction of the intragenic deletion of exons 6-10 of |
| | | ERGΔexon 6-10 cDNA (150 nucleotides 5′ and 150 |
| | | nucleotides 3′ of the junction.) |
| 11 | cDNA | junction of the intragenic deletion of exons 6-12 of |
| | | ERGΔexon 6-12 cDNA (20 nucleotides 5′ and 20 |
| | | nucleotides 3′ of the junction.) |
| 12 | cDNA | junction of the intragenic deletion of exons 6-12 of |
| | | ERGΔexon 6-12 cDNA (50 nucleotides 5′ and 50 |
| | | nucleotides 3′ of the junction.) |
| 13 | cDNA | junction of the intragenic deletion of exons 6-12 of |
| | | ERGΔexon 6-12 cDNA (100 nucleotides 5′ and 100 |
| | | nucleotides 3′ of the junction.) |
| 14 | cDNA | junction of the intragenic deletion of exons 6-12 of |
| | | ERGΔexon 6-12 cDNA (150 nucleotides 5′ and 150 |
| | | nucleotides 3′ of the junction.) |
| 15 | Polypeptide | wild-type ERG protein encoded by ERG1 isoform |
| 16 | Polypeptide | ERG_I1_D6-10_distal ORF |
| 17 | Polypeptide | ERG_I1_D6-12_distal ORF |
| 18 | Polypeptide | TMP_ERGa_ERG1_CDS |
| 19 | Genomic | Genomic DNA ERGD6-10 |
| 20 | polypeptide | ERG_I2_D6-12_distal ORF |
| 21 | cDNA | junction of the intragenic deletion of exons 6-10 of |
| | | the ERGΔexon 6-10 cDNA (10 nucleotides 5′ and 10 |
| | | nucleotides 3′ of the junction.) |
| 22 | cDNA | junction of the intragenic deletion of exons 6-12 of |
| | | ERGΔexon 6-12 cDNA (10 nucleotides 5′ and 10 |
| | | nucleotides 3′ of the junction.) |
| 27 | cDNA | junction of the intragenic deletion of exons 6-13 of |
| | | ERGΔexon 6-13 cDNA (10 nucleotides 5′ and 10 |
| | | nucleotides 3′ of the junction.) |

[0187] All publications and patent applications mentioned in the specification are indicative of the level of those skilled in the art to which this invention pertains. All publications and patent applications are herein incorporated by reference to the same extent as if each individual publication or patent application was specifically and individually indicated to be incorporated by reference.

[0188] Although the foregoing invention has been described in some detail by way of illustration and example for purposes of clarity of understanding, it will be obvious that certain changes and modifications may be practiced within the scope of the appended claims.

1. An isolated polynucleotide comprising a nucleotide sequence having at least 95% sequence identity to SEQ ID NO: 21, 22 or 6, wherein the presence of said polynucleotide in the nucleic acid complement of a biological sample is indicative of a novel subtype of B-progenitor ALL.

2. The isolated polynucleotide of claim 1, wherein said polynucleotide comprises the sequence set forth in SEQ ID NO: 21 or 22.

3. The isolated polynucleotide of claim 1, wherein said polynucleotide comprises a nucleotide sequence having at least 95% sequence identity to the sequence set forth in SEQ ID NO:7, 8, 9, 10, 11, 12, 13, 14.

4. The isolated polynucleotide of claim 3, wherein said polynucleotide comprises the sequence set forth in SEQ ID NO: 4 or 5.

5. An isolated polypeptide comprising an amino acid sequence having at least 90% sequence identity to the amino acid sequence set forth in SEQ ID NO: 16 or 17, wherein said polypeptide does not contain a DNA binding PNT domain and a CAE domain and said polypeptide has dominant negative ERG activity.

6. The isolated polypeptide of claim 5, wherein said polypeptide comprises the amino acid sequence set forth in SEQ ID NO: 16 or 17.

7. A kit for detecting a novel subtype of B-progenitor acute lymphoblastic leukemia (ALL) in a biological sample comprising a reagent comprising a polynucleotide that can detect an intragenic deletion in the ERG gene in the nucleic acid complement of said biological sample, wherein said intragenic deletion comprises the deletion of at least exons 6-10 of the ERG gene.

8. The kit of claim 7, wherein the intragenic deletion comprises the deletion of exons 6-12 of the ERG gene.

9. The kit of claim 7, wherein the intragenic deletion comprises the deletion of exons 6-13 of the ERG gene.

10. The kit of claim 7, wherein said reagent detects said intragenic deletion by directly assaying the genomic DNA sequence.

11. The kit of claim 7, wherein said reagent detects said intragenic deletion or by directly assaying the transcript produced from the genomic DNA.

12. The kit of claim 7, wherein said reagent comprises a pair of primers that amplify an amplicon comprising the sequence set forth in SEQ ID NO: 21, 22 or 6 or a polynucleotide having at least 95% sequence identity to SEQ ID NO: 21, 22 or 6 and thereby detect the intragenic deletion of the ERG gene.

13. The kit of claim 7, wherein said reagent comprises at least one probe comprising a polynucleotide sequence that hybridizes under stringent conditions to said ERG gene and thereby detects the intragenic deletion of the ERG gene.

14. The kit of claim 13, wherein said probe comprises the sequence set forth in SEQ ID NO: 21 or 22 or a polynucleotide having at least 95% sequence identity to SEQ ID NO: 21 or 22.

15. A method for assaying a biological sample for an intragenic deletion of a v-ets erythroblastosis virus E26 oncogene homolog (ERG) gene comprising detecting the intragenic deletion in the nucleic acid complement of said biological sample, wherein the presence of said intragenic deletion is indicative of a novel subtype of B-progenitor ALL.

16. A method for diagnosing a novel subtype of B-progenitor ALL in a leukemia patient comprising assaying a biological sample for an intragenic deletion of a v-ets erythroblastosis virus E26 oncogene homolog (ERG) gene comprising detecting the intragenic deletion in the nucleic acid complement of said biological sample, wherein the presence of said intragenic deletion is indicative of the novel subtype of B-progenitor ALL.

17. The method of claim 16, further comprising selecting a therapy for said patient.

18. The method of claim 15, wherein the intragenic deletion results in the expression of a C-terminal domain deleted ERG polypeptide having dominant negative ERG activity.

19. The method of claim 18, wherein said intragenic deletion of the ERG gene comprises the deletion of exon 6 through exon 10 of the ERG gene.

20. The method of claim 18, wherein said intragenic deletion of the ERG gene comprises the deletion of exon 6 through exon 12 of the ERG gene.

21. The method of claim 16, wherein said intragenic deletion of the ERG gene comprises the deletion of exon 6 through exon 13 of the ERG gene.

22. The method of claim 15, wherein determining if said biological sample comprises the intragenic deletion comprises a nucleic acid sequencing technique.

23. The method of claim 15, wherein determining if said biological sample comprises the intragenic deletion comprises a nucleic acid hybridization technique.

24. The method of claim 23, wherein said nucleic acid hybridization technique is selected from the group consisting of in situ hybridization (ISH), microarray, and Southern blot.

25. The method of claim 23, wherein said nucleic acid hybridization technique comprises a probe comprising the sequence set forth in SEQ ID NO: 21 or 22 or a polynucleotide having at least 95% sequence identity to SEQ ID NO: 21 or 22.

26. The method of claim 15, wherein said reagent detects said intragenic deletion by directly assaying the genomic DNA sequence.

27. The method of claim 15, wherein said reagent detects said intragenic deletion or by directly assaying the transcript produced from the genomic DNA.

28. The method of claim 15, wherein determining if said biological sample comprises the intragenic deletion comprises a nucleic acid amplification method.

29. The method of claim 28, wherein said nucleic acid amplification method comprises polymerase chain reaction (PCR), reverse transcription polymerase chain reaction (RT-PCR), transcription-mediated amplification (TMA), ligase chain reaction (LCR), strand displacement amplification (SDA) and nucleic acid sequence based amplification (NASBA).

30. The method of claim 29, wherein said nucleic acid amplification method amplifies a polynucleotide set forth in SEQ ID NO: 21, 22 or 6 or a polynucleotide having at least 95% sequence identity to SEQ ID NO: 21, 22 or 6.

31. The method of claim 15, wherein said biological sample is selected from the group consisting of peripheral blood, bone marrow, apheresis samples, cerebrospinal fluid, saliva, urine, gonadal tissue, tissue (e.g. chloroma) biopsies, or any other human tissue sample potentially involved by leukemic infiltration.

32. The method of claim 15, wherein said biological sample is from a human.

33. A method for assaying a biological sample for an C-terminal domain deleted v-ets erythroblastosis virus E26 oncogene homolog (ERG) polypeptide comprising providing a biological sample and detecting said C-terminal domain deleted ERG polypeptide in said sample, wherein the presence of said C-terminal domain deleted ERG polypeptide is indicative of a novel subtype of B-progenitor ALL.

34. A method for diagnosing a novel subtype of B-progenitor ALL in a leukemia patient comprising providing a biological sample and assaying said biological sample for an C-terminal domain deleted v-ets erythroblastosis virus E26 oncogene homolog (ERG) polypeptide, wherein the presence of said C-terminal domain deleted ERG polypeptide is indicative of the novel subtype of B-progenitor ALL.

35. The method of claim 33, wherein said C-terminal domain deleted ERG polypeptide comprising the amino acid sequence set forth in SEQ ID NO: 16 or 17.

36. The method of claim 33, wherein said C-terminal domain deleted ERG polypeptide comprises an amino acid sequence having at least 90% sequence identity to SEQ ID NO: 16 or 17, wherein said C-terminal domain deleted ERG polypeptide does not contain a DNA binding PNT domain and a CAE domain and said polypeptide has dominant negative ERG activity.

37. The method of claim 34, further comprising selecting a therapy for said patient.

38. The method of claim 33, wherein said biological sample is selected from the group consisting of peripheral blood, bone marrow, apheresis samples, cerebrospinal fluid, saliva, urine, gonadal tissue, tissue (e.g. chloroma) biopsies, or any other human tissue sample potentially involved by leukemic infiltration.

39. The method of claim 33, wherein said biological sample is from a human.

40. A non-human transgenic animal that has been altered to express a polypeptide comprising an amino acid sequence having at least 90% sequence identity to the amino acid sequence set forth in SEQ ID NO: 17, wherein said polypeptide does not contain a DNA binding PNT domain and a CAE domain and said polypeptide has dominant negative ERG activity.

41. The non-human transgenic animal of claim 40, wherein said polypeptide comprises the amino acid sequence set forth in SEQ ID NO: 16 or 17.

42. The non-human transgenic animal of claim 40, wherein said polypeptide is encoded by a polynucleotide comprising an intragenic deletion of the ERG gene.

43. The non-human transgenic animal of claim 42, wherein said polynucleotide comprises a deletion of exons 6-10 of the ERG gene.

44. The non-human transgenic animal of claim 42, wherein said polynucleotide comprises a deletion of exons 6-12 of the ERG gene.

45. A method of screening for agents capable of selectively inhibiting the activity of a C-terminal-domain deleted ERG polypeptide having dominant negative ERG activity comprising:
a) contacting said compound with the C-terminal-domain deleted ERG polypeptide, and
b) determining whether said compound inhibits the activity of said C-terminal-truncated ERG polypeptide.

46. The method of claim 45, wherein
said C-terminal-truncated ERG polypeptide is expressed in a eukaryotic cell; and,
determining whether said compound inhibits the activity of said C-terminal-domain deleted ERG polypeptide comprises monitoring said cell for a suppression or elimination of an adverse phenotype associated with expression of the C-terminal-domain deleted ERG polypeptide; wherein an agent which suppresses or eliminates said adverse phenotype is identified as an inhibitor of the C-terminal-domain deleted ERG polypeptide.

47. A method of identifying an agent capable of selectively binding a C-terminal domain deleted ERG polypeptide having the dominant negative ERG activity comprising the steps of:
(a) contacting a candidate agent with said C-terminal domain deleted ERG polypeptide; and,
(b) determining whether said candidate agent specifically binds said C-terminal domain deleted ERG polypeptide.

48. The method of claim 45 wherein said polypeptide comprising an amino acid sequence having at least 90% sequence identity to the amino acid sequence set forth in SEQ ID NO: 16 or 17, wherein said polypeptide does not contain a DNA binding PNT domain and a CAE domain and said polypeptide has dominant negative ERG activity.

The application's sequence listing, which the Patent Office published only in electronic form, follows.

SEQUENCE LISTING (32 sequences)

SEQ ID NO: 1 - DNA, 279818 bp, Homo sapiens
  misc_feature (0)...(0): genomic DNA of native ERG gene
  exon (1)...(37): Exon One.  Isoform 2, exon 1
  exon (76750)...(76851): Exon Two.  Isoform 2, exon 2
  exon (85948)...(86033): Exon Three.  Isoform 2, exon 3
  exon (163222)...(163332): Exon Four.  Isoform 1, exon 1
  exon (216075)...(216292): Exon Five.  Isoform 2, exon 4; isoform 1, exon 2
  exon (238136)...(238287): Exon Six.  Isoform 2, exon 5; isoform 1, exon 3
  exon (257988)...(258191): Exon Seven.  Isoform 2, exon 6; isoform 1, exon 4
  exon (259060)...(259140): Exon Eight.  Isoform 2, exon 7; isoform 1, exon 5
  exon (261052)...(261123): Exon Nine.  Isoform 1, exon 6
  exon (269253)...(269321): Exon Ten.  Isoform 2, exon 8; isoform 1, exon 7
  exon (269982)...(270038): Exon Eleven.  Isoform 2, exon 9; isoform 1, exon 8
  exon (270655)...(270702): Exon Twelve.  Isoform 2, exon 10; isoform 1, exon 9
  exon (277774)...(279818): Exon 13.  Isoform 2, exon 11; isoform 1, exon 10
cccccgagggacatgagagaagaggagcggcgctcaggtaagctggattttgcggtcggaattcgcgtagaaacgaaaacttctggaaggggcttagccccgagccccggaggcggacaagctgagcctcctggctgcaccctttggaggctgctggttgcagacgccgtcgtctcccaagggcggctgtcaccgcgtgcgtcggtcagaccaggccgcggtgccctcggcatccccgcgtcccggcggctgtatccggctcctccccacgaccgaggtcccgggcaccgcgcctctccctccggacgctctgcgcgacgtcgtcccagttctcatcagcatcgagggcagtccgcggtcattttataaacgtcttagtgtcgcaaccgttttcacttttactattttcaatgtttgcaacggttttcaatgaggctggaaaaatatcacttctcgctaaaagcgaccccgagttaggaggagcgcgcacccccgcggctccccctcccacactttccctcccctgaccccctctcctcccctctggtccttcccttgctcctcgcccctccagtagtcgcgtgctgggttcctttcctgctggggccggactctctcctccggccgtcccagcctctgctcctccgcctccctcctcctcttcctcctcctccgcctcctcctcttcctcctcctcttcctcccggagccgccagccgcgtcctaaacccgagcagggcgcgtagtgtccaaacctgcccgcgcggcccgcgctcttggccccgagggcgcgcgcacggacacgcgagcacacccacacccacgcgcacacggacacgcgcgcactcgaagactcccgcgcgctcgcacccacgcgcacctggccacgcgcgtgcattcccgcccacgcgtccctgccccgcccccggcgcgcactccgggttcgcaagtcgcgcgtcggggcggccgccctgctccgcgattggcgggagccggagcctccctgaacccggcgcccacaccatgggctgagcccgtcggcgccgagggagttagtgcgacccggctcggcgcgcacggccaaggcacgcgcgctggcacacgcgggcgcggacacgcgcggacacacacgtgcgggacacgccctcccccgacggcggcgctaacctctcggtaagtccagcgccccacgcgacctgcccggctcccacgctggctacagcggctgcggggacggggaggaaggcagcggggtggccctaggggctcactctgcagggctcttccgacggcgccgggacaggtggggcgtccagcgccgggagggacggctcgccagtgcggggtcccagggaggcgcgtgcagtcgggtgcggatggagaggagggggcaccccgaaattgacaagggccaggagagcacaccgcggggacttcatctggggccccgaccaagaggttatttgtccttgtctggagtggaaatcagggttgaactaaaaaagctgacgcttggcctaaagtagggaccaggtttgaggctgggttgtcactgtccgctgggtcctgatggtggaatgacccccgacggcgccttcccgcacaccccgcaacaccggctctgggaccagctctcagcgccaggagcggtccctttcctttcccactctcagtctcagtcttttcacctttccattcttcagcctgcagctgttaagtttatttgcctccagtttaccaccctaattgcaaaacttggcatgttaaaaaaaatatagtctgtattttatcagctagccttacctggtttctgtctgaaatacatcgtccgtttattgctatggtatgttgcatagatgcatagaggcattaattatcttttaagtacaggacaaattctgttattaatagcagactacactgcgcaataaaatggataaacaatttcaatgaggatgtggatttaatacaactcatcgttaatctaaagatagtttcctttatctttcaaaataacatattcgtatgtgctacaggtttcactctgtacatgtctctatagcttttgtagttcagaaaactttcaatgtgagtaaaaatacattttattcttccctgggtgacatacataggacacagagtttatttacctttgggactatttttgactgttttccattctctccaagtagtttagagcccctgaagggagaactgtcacagtcccaaagttaacccttgctccgctggcattggctggtgcccgctcccggggcaggccagagctcatagccttcatccacaggaggatcaggcaacagacgttgcgaagaacccaaccatgtaaattaattcaccatgtgtcaaattattaataagctaattacaccattgaaattataattctagcagaaacggtgagctatgtaaacttgtggctaatatatcaagttttacaattctcaagaaaggctttagaagagctacacacatcacaaatgctatttgccatttggtaatcctagcttcggtttgggtcaatggcttttggaaagtacactgaattagcaaatgggtaatccgtctcaagatatttgttaaggaatatataattccagtagcacttataattccagtttcttctcttttgtaacattttataattacttcattctatttaaaaaaatttagagtagaattgtagtacatgatttcacgtttatctgttatttcatgaggaattattggtgatttaatctttagctaaaatttagaaaattagcatttaccattgaagggattgtgtgaggggctgcattcacacctgtatataaacattcccccctccacgttccacgttttgcttttatattaaagaaaaaccttgttgagtttttaatcttataaaatcagatattttatttgtggtaagacctaagatcccaatggaataccagatacataagtaagaaggaaagcatctctgaaagacgtcagaaggaatgtgtaactcacatactattctacaatgttatacgttatgtatcttttaaatgcatctcacattgtaagtagggtaataggaaactttcaacactttttttttctaaaagtaatattagtttttatttttatcttgctatctttaaacaaaaaagaaataaaagggggaatttatttcttctcaaaacagaagagctaatgtttctggaatcgtttcctattcccaggcaaaaaccgatagcaagtcagtcccggtcataggatctggagtggtgggaagacattgtcatagtgaataaatgtctgatgcctgttatttcatagaactccattgagaaggtgtcgacacagagccacctacgtttctaatgagacttatggagcctgggaagcagtttggtcaaggtggcaaaatcccagctctgtgaggcatcaggtcacttctcagtttaagttgacagctgatctctctgaatgcaggtctctttttgtcacctctttgcttctttaccccttgcgtctgagcagttttccagagagcaggagtatggcaaaggagttcttttttccttccccagtgtgtaaggttacttgggctttcccagggagcatggtccttcacaatacagctattgtttaatgttctacaccttgaatttgaaccttagcagcaacatttgtaagaaaaataggctgatgtaacagggacgttcagatctttggggcacagtttccgatgattatggtacttagtggcagtggtgtgagtagggctttttgaaaactctgaaaatcactgcggtatttggggatgctcatgcttggcagtgaccagccacccctccatattgttgctgttccttgcatgatagcattctccctggtatttcccacactcttattaggggtcagttaattagttgtccattatgcattgtcagtgtacggacctctcacaatgattgattgaaagcagttattttgtaaataaacaacagcgggagttttccaatggcttttccaatggctgggctgtcacccaaaccagttcttcaacatagctaaaaaagttaaaagttaaagttaaaaggggcatctttcccttttaactttatcttttatttaaaacattttcatattagaaagaggcttgaatgcttcatgtttgtaacattgcaaagtctagtgaaggtagtgaaggagggtgagctaaaattactttgctaaatttaagtataagtaaaatgtagacaaaaccaagaaattaaagggtgcatctaaaaatggagcgctggatctaagttttagatttaaactaacttttaagttctcctatttttagggtcgcatgtcataatctgggagaccctgattgcgtatgagaaacagtaattttacaatgaaagtaaggggtttggctatcttgactcagtgcgtgttcaggagaatgtgcaaaggaagtttcattatgtgactctgtcctattcagaatggctatatgagacaatggaaatatccttcaagtatgtaaaataggccatttgaattaatttatcacctctttttttttgttattatcccagagaaatagacatcagatgtgatctgggacaaatctttagtgtgtctaaaggtttttaaaacctagatttgtagttgcttccttttaaagcctaacctatgattttgaattgttttagtgggaatgagatttttgtacctgcttttgtcttatatgtgctcccttttaaggataacattattgcagtaattattacccctgcaaaacatactcgggggggaaaagctgtctctctaggaaataggaaagaaaacaggcatatatagaatgacttttaaaaaataggaaacccttattttcacttgatgtcagcattcagcaaaagttcccacatgttcatttgaaagtgtagaaatgcatttgaacctcagttttgagagtaggggagcaaaggagcgaagccttatttagtgaagtactatcgtcctatttccattaagtgattctctgttattggtagaaagattaattttctctctaactgggtggaaagagtggctatgcattcttggggctcactaaagtacttaaagttggaaagtaaaagaaagactaaattggagcgtgcacatttttctgcacgcctggcagggaggtttgtgtgactatcttaaggaaatattagcttgtgcaccgtcagaagctgcatcctggaatcagattagctggtgttgtgaatctccatctgaactaagatggacagtaagagaatcccaatatcttagtaaatctgttacttacctattgccttagtttaataaattgattgaaattggcaatgggaacgtgctgttccttcttggtctacagatgtgagttcctgaaatccaggcagcccttgatgtctcgatggcccaatgacatgggacaagctctgcagtgtcctttcatgggtcctgtcactggagctttccatctgtaggggctgctgccagctttggagcctgaacctctctgccctccctggaacccccctccagccagaaacccctttgtaatattcctctctttcttccacagacccttgcctgctgctggggcctctgcaggggcagtggtttctcatcacgtgtgggttggcggggggcgcggtgaagagtaggggagggagagagccctggcctctggggaccttaaaactgtatttcatggaaagcctgttttccaaggcaggcagattctgcagtactacctgcaattcctcccatttggcctgttcaccaaataatttgagggggcagagctgggtaccagcctttacttagagctgtgcttctgttgaaaagtggggcccaagtttgtattaactaatctgggaactggatgctgaggtagagtctgttggtcatgttgttgtcccccaaaacttcacttcttaaaaccatgacagtttcatggttacagtgacagtgctgcttacattttaaaaatccacactcaagcctcaataagcctgaagggaatttggcctgattaaatggttctttttagttgttcgtagtcagatgtcacccctcacacacaattaatttgttcggagccaagtgcgttccacacacattgctaaagggtgagaagaggggatagcaggtgaatctcctagcaatcaagctaattatccatttgcaatgtatggtgggagatgctgaatgctagtgcaatgctagcattgcattgtgttcttaaaatgaggactcttgggagaattgggaagcttaggcacaggcaaagcaggaatttcagaaacacgggatacctccctggacccacctctgtgtgcaatgaaggcttggaattctgcttgacatgagagtgaacgggggtctcagggttcagaggaaggactgaaagaagctattatgagggccctgtgggaggaagagggggtgactgtggcactacttaggaaggggaaactttagacctcagcactgaagaaggtgcatttcaggatttttgcatgggaaatgcagagatctaagcagagtataaataataagtgaaggatgtactagcaaaatgaaatgttttgaaacagaaaccactcacatttacaatctcaacataaaactttttaattaaatgtatcagaaagctgagatttcttttattaggaaatgaggtaaaaacattttgaaaagaaaccaagtgctaattgagaaacattctaagatttcatatgttgaatggattctcattaaaattatacccaacctcacaaagctgatgtgagcctgctgccagatttacaaatctgggtctataattgcacaaagtttaaacttgccttgtgcaaggcttgctttttctgcagttcaagatacagcagcaagaggacagaataagcaaaagtggaggaaaaatttgcttcttcagtattgaaaagtactttctagtctatttgaccccgacagtaaaacttacttcactacagagttttaaaatagaaataatgacagtaaaaatcaaatctagggagtcttctggagaagagatgttagatcagcatattattagtatttatcccaaattctgaaaccttacctaaaggccctgccattagaacagagagggatattattgattactacttgaggtatcaaagtaaaaggattttatttatgtatttatttatttagagatggagccttgctctgttgcccaggctggagtgcaatggcacattcttggctcactgcagcctccaccgcctgggtgcaaatgattctcctgcctcagcctcccgagtagctgggattacaggcacctgccaacaggcctgggtaatttttgtagtagagacaggatttcgccacattggccaggctggtctcaaactcctgacctcaggtgatctgcccgcctcgtccttccaaagtgctgggattacaggcgtgagccactgcgcccagccagtaaaaggattttatagatgaaatagtatcagttctgaagatcgaatatctcttaatgaaactgaatatatttttacagttttctaaggcttgtaaatataagtgattagacagaatgtcccacaagggcagtttcttctaagtaccccatagccaaattgtaaaaccaaaggtaagtcaataaaatcatttcataagtatgtgtaacccacagtaagggctgtatttgtttgtacattacgagcacatttgtaaatgcatttagcatcaatataaactttttctttgcaaaattaagcattacattgtattaattgttctttatgggtcttaagcaacgtgaaaatacatttcttaattaaaatatattgagcatctattaaatgagagcactgtcccaaacaagaggtgggagcataagtcatacagggactgttaagacacgggacacgtctagagattagacgaacaactgcaaatttagtgggagaagccagaacattccgctatggagcccgcctatccacctgtctgtctgactgcagcaattagtggcatgcttgaatttttctctcttccatgagttgtgttaacaggtaaacaaaactaccaccctttttactttaaatagctaagtttagctgaagagaggagcatcccctcttgcaaggacactctaaatgcggtgtccttaggataaatacctacaggtggaaattaatacaggacaagtggaatgcctgagaattcagggaatgctgagtaggcagagatcagcgggcagtcagatttgactcaaggtgagaagatacaggactccatccacagagggggtgctccggatcctgggaaaggcacgtgcaaaggaagggaggctagaagctacagactgtgtggtggaaggcaagctgtccatttagtccatgtttttgccttatgttctgtgtaagacttcatgcaagacactatgcagaagacttgcacagtgccttcagggaggcaaaatccagaaagaggatgaatccgcatgctatggaatctagaaagggaggtgagcaagaatgccatggaattggggcagacattcacaccacagagtctagaaaggaggggaacattcacatcgtggaatctagaaagtgggcgaatgtgcatgccgtggaatctagaatctaggcggtgaatgcgaatgccgtgcaatctggaaagtgggtgaacatacttgccatagaatctagaaaaggggtgaatgcttgtgtcatgaaatctagaacgggggtgaatgtgcacatcatgaaatctcgaaggagatgagttcacacaccaacaagagtggcatcctcagtgggaccacctggttgaactgggccagcatggcagtgaacagggctctagactgtatggcaatggaggagatgttcccgagcagggagacagcctcgtgcaatacactgggtttgctgtagggccgttcttgggcatgcttgctatcacacaggtccttctttcttatggaatcattggaggatttcatttttagccttagcatcaggagtcattgtctgagcatttggttggatttcattatttggagacgtgtgaatgacccaactccagcagatatgtgagaccctgaggcctgcctggcgggccattgcattcctagctcgagtttatgttcttacccttgtttctctttagcttcatctttattttttattttgcttctgaattttaaacaaccttgtcatattgcatatatccttgtagaccactttgagtccctttttgggaacaaggtagagtataaataacataaaatagaatcatgcaatccaaaagcaatctacaccattccataggaagatcagaggatcagagcatgctacccggaggctgaggcccttgagctgtgccatggcgtgttggatctggattggcgggaatggtagagatagcagtgggcgggagggtggaggagtcaggcctgctggtgtgtttggagggtggaagtgttacctgggagtgggtcacacagtgtggaaactgaccaaatcctctggagtgttggagggatcagaccagacacctacttcaatatctcaggtgtaaagttaagaggtagggaagaaagcagtcttacataagggaagggagaggtgtgatgttgtggaaggtggcaggtgacattcactcaccagatggtatagccacaggagacactttgccaggactgtcttcactgtggctctttgcaggaggtgctctaattgtcctcattttccagaatagcagtgaggctcaggagtgctgagcaccttgcctggagtcacacagtagtgggaaccagggcagcatcagaaccaggcaggcggatgctgagatccacccatgggactctgctgtgtgtagttatcttggtcagagtggcgggcctgttatggaagtgaccggaagggagcgagtgacgtggaggcagagtccgtgtaaggtcctggcagtgctgggcaaaggaaatagaacatgaacttcaagggtagttttaaatcttccagtagccaaattaaaaaagacagggacaggtggaattaattttaataatgtaatttatgtaacacatgctgaaaatactaccatttcaaatgtaatcagtgtaaaatatggatgagatatttgactttattttttttctatatgaaatcttcaaaatccattgtgtagtgtatatttacagcacgtctccatctgggctggtcacatttcaagggctccatagtcacatgtggctagtggccaccatgccgaatagtgcaggtctagaatgtttagcttaggaattcaaatttaatataatgagcaaccgcaacatctattatgtctcttggccacaggagtagaagttttgtgaccttatgtcactaaggaaccagatatgatagcaatagaaaattgaatgccagcgtgacatgttcggtactagatctgcagtttttacattggagggaaaaatgtatgtataatttcctgttgagtcacttcatgcttttaaagggtaaaataaaatactgaatttcaggccaaaactctgtgtgccagctaacaaatagtgcggcttttgccggaatcatgctgcgacaactccaggcataaaaatgctatttgaatatcctctatttaaagataattccagcttgatgacaaatttcttattttgcatgtttcttgagaataatacaattgattattttgaagaacggcattcttaaagtgctagaatcccagaggaagaaagcacatcaactaaatgtattgctatagaattaacctttacaaggacatattcacactatttgatcatgacaggttgcacataacacaggcttttcccttcgtttgtgatactgaagcttatggaaaagtcttctgaagtcaatccacagtgcttacatgccatttgttattatcagtgtgctatatgtgtactatacgtgatgcgtcattgagtaaccttctacccttttaactatgccactcttttttttttaatttttatttcttgagacagagtcttgctctgttgcgcaggctggagtgcagtggtgcgatcttggctcactgcaacgtccgcctcctgggttcaagcgattcttgtgcttcagcctcctgagtagcagggactacaggtgcacaccaccatacccggctaattttttgtattgttagtagagacagggtttcgccatgttgcccaggctggtctggaactcatgagttcaggcagtcctcctgcctcagcctcccaaagtgttgggattacaggctgagccaccgtgcccagcctatgctactcttaaagttaagatttcatttaattttttgtgcaaagtaagaaacttcactagcagattcttactcattcacattttcctgaataagaaatttgtttttagttccagtagctggtctctaggcaaatttctcgtctgtggttctttgtagataagtttgttttcattatcgctagtgcataataagggaatttcactctttttattttggtttatttttcccagtgggcagtgcttactgtaaaaataaaacaaaaactgctaaataaaataagtgtggcttctctagactctaatcaccatattgaattttacacctaaggcagcacaattattggtaaccaaacagtgaaggagaaggaatattgtggtttattaaaacacccaaccatacccaaaacctctgaccaaggagcatgactgtgtgttctcgcgtctagcattatacgtctctggtgtgtagcgatgcttcattgtagggtcacgtaaggacaaatggagaagcaagactttatcttgtgtactgcaggctccccagctttcaaacgtaggcaatgagttggattttgtagttgaatcttgtttcgtcctataaggaacgtgggccactaggtgtgagccctttaggggtaactgaaattctattccaaggcctcctgcatgtccacttgatgccgtaagctgcattcaagcattgcagtttcgtatcagagtacaaatttaatttaaagtctaaattatatttgagcagtctgaagcacattaaggcttcttaaataattcacttgaggttacgttcagtgaacatgtgtaaatatgagaacgtgcgaggcaagtggtctaaacacacaatgaatacgagaccacattgatgtaagccacaagtgcttaaaatcttgtcggaaaaagcgtgtcatccccggtaaccagaacgtttgactggccatgtggctcgcagggaagggttggtgtccaggtgcctctgtgcttggtccttgcagtttgccacatcatcaagggagacctttgagagaaacgctacgtcatcagctcatgggtgtggctctcagctgcagcgccacaggggagacagaagccccctgggtgctgcctgccgcagccctcggtgatgccaaaacagccgtttcccatcagcttctcaggttgggtatctgcgggtgcgaaatggctgaaatgtactcttggaaactgttgtgtttagttaaacttggattaatgagaaccatcgagtttattttttcctttgggctgaacagttttcatatgttatagagatgtgtgggtggattcaggggcatgacaagtgactcccagtagagtcagctcatgaaggcatctaagcatcgctgagcaatgccccttcctcactgtctctgagcttctagaccttcctcctgggcacgtccttccttaagtgtttggactcacagttctgaagtgtcgtcgttagtgaggtttctcctgcagtcaacacacccagggactaaaagaaacaagccagcgagtccaatgaaatcaggctgcagatctgaagtgcttttggaatatcctgcccctgctttctgtcctctgtctggttttcatggaaatttgtgtctgggaatgagggggaatcggagtggatttgctggaggcaggtgcctgtgttctttggcccttgccattaggagtcaggaccaaggaacctcggaggaggtggaggaggaggcagaggccgtgggagatgcgatgagcacggtgcaatctttataagacagtagggatttccacagacttcctgatttttgaaaattattcataagcctgccctcatctgggattttcaggacagaaaacataccccatttactgtccacgctccataaattaccctttcagattgttgcaaagttattttttgcattctgtaatgctggcatacgtaagctctgtgattgtgagtaaaatgcctccatttctttctccagcaaggatcaggacggcactggtcaggacaacatgcggtagcatcgcggccccatttgaaatacaggctacttctccaaaaggttgggaataaatgctggcccaaccctgatttaaaaagattaaggaagaaatggaaatgaggatcagaattagttacgtttgcactggcaaaggaagcgagattaaatacttgctttcagtctttgctccaagcaagtaaaaaatttaaaaaaaagaattgcatattacatatttgggaaagttaaatgcatgcttcctttctggaatgcacaagcctatttgtaatgggctttgcaaggcaaagattgctgcattggacacttaacatgaaataagatgtcctgagaaatctttagttcatagacattaaaaaataagttgctgttttaaataaacataatcatctgcttcatctgtgtcagagtgccgagtctttatttctttcctttttattttttgctttttcagtggttttatttcttgtgctttaatacccattggcttctaaaataggaggtgacgtgtatgtgacttgttaaagagtgaatgagtgtaacataaccctttcaattcccaacttagagaaatcattttggggataccttaagcatatcagaataaaagaaaacttagtatttctgtgtcacctgaggcactggtgccaaaaccagcaagaagtagtgacattttgtaatgtagttacatttaggcttaaattagtgtttttcaaccttttttttcatgaccaacctcctgttttcatgatcaacctcctaaaaagcattttctgattttttttcctaattgtccctcctcacatgaaaatttaataccacagatatactgttttagtactttgcattatacatatacgtatgtctacatttaggtatatctgtgctttatacagaaaaggaataagacgtttttcatccttcaagaactaattttagcctccttgaggatgcatggcttaaatacgaaatgccaatacttgactttgcaaagtattctgtttaggaaaaaagacggtggatgcccgtacgtgaccttagaaaggactgaaggtggtgaggagattcaaagtaagcaaggactgggacaccagggaatgatgttctgttggttgtcgtccttgtttagaacgtggcctgaaaactgataatgagaaaacaaaagatggatgacagctcccctttgtattgttcaagcaccattaaacatgccgaatcgctgaccacatgttttccacgtatgagaaggtgacacggtacttatcaaagttatgagtggacaaaagcagaaggttgcaaaaaccagtagcctagagagagcaaggcggcatggaggctggcagccaccggtgagctgatgggagaggctgcctttatgaacttctggacctgagcacgcagccttttccctgcacgctttggatgtaacagtgcaggtcatgtggcgggactgacgtgcagcagctggatcacattgactctgatctttcccctccagtaaaaatggaaatgtaataaaacaaacaacaacaacaaagatgctgagcttaccccaaaactcaatcagaagagaaaaacacctgggccattgtcaagagaaacaaaactgggccggtatgaacatgatcagcgaatagtatttccattaaaaggcaactgactcagagatggagggtgagtgttctgtgaggcagagctgaataacccacccacgccctgtagctgacaggatcacttaagcagagttactagaaatgacccagtgatactgaaaacaggaaaaagtacatgaagggaaaagcagattcttaggaagggaaagaagtgtgtgaaaccagagcagatcggtcagaatctaacattctgtttgagtctctcctcatcacctgcagtcctaacaaatcctccacttctcatcttcaagtgagtaatggtatggcaatgccctgtcttctaggagagattaaatggtaaaggatgttaccatgagtgcagaagcgactgttttgtttttgtttgttttgcttttttttttttttttttagacagagactccctctgtcacccaggctggagtgcagtggtgccatctttgctcactgcagcctccatcttccgggttcaagcaattcttgtgccgcagtctcccaagtaggtgggattacaggtgcatttcaccatacccagctgattttttaatatttttagtagagacagggtttcgtcctgttggctaggctggtctcgaactcctgacctcaagtgatccgccctccttggcctctcagagtgttgggattacaggcgtgagccaccacacccagtcaagactaggtttctaagagaatggttgcatccaactcagaatgtgggaagtgtggtgatgctttgtgctggtcgacgtcttcctgggccatcactagagtatatgcttctatctgggggctgagatcagagtggtacctgcattaaacatcaacaagtcggctatacagagcccagctgtgccttttgcttattgctttctgggcctgtatttggaatgtaaaagggacatacattttcactgatgctttttgtctttgttgtctatgttttaagtggtgtttaaattcaagcaaatactgtttagttgtaaaagctcactctttctcaagtctttcctcccttctgtttttccaaattgtctcttttgaatcatcttacagatagagttagtttgagtcagtggtgatccacacattgaatttggagcccaagccgcagaactgaccaagtgcttgtcatggtcacgtggaacccagatctgaagtctgtgaattcttgcccttaaaaatcactaaaaatacctctttgaaatatgactcgtttcacagtggattccacagtagcaaaatcacattgtggtttatttggtagcagggtcagatgagatgatacattgcaatgtatgcctacactcttatgtatatgaaacctatttatattacaagccatatatttgtttctctatagccatagttcacacttaggtttttcttgccttttctgggtaattccctttgagcttagtaattggggccgttaactgtacaacagtgtaggaatttattatttacttatttttaagggtttaaaatttttaaaatcgtttatttttttctgagacagagtctcattctgtcactgaggctggagtgtagtggtgtgaccacagctcactgcagcctccatctcccacactcaaatgatcctcccacatcagcctcccaagtagctgggactacaagtgcatgctgccatgcccggctaagttttaaaatatttttgtagagatggggtctcgctgtgttgcccaggctgctctctaactcctgggctcaagagatgctccctccttggcccctcaaaatgctaggattacaggcatcagctgcccagtgtaggattctagaaacattaatgatccttaccacctggggtcaatgatggcatgaagatcacatctgtattcagaaaaagtgaatatcaaatacatgttatttctaggccatttcagagttgtttcactgcttggctcaattttaatatgatttttgtatggcaattttttcccccaaaatatttaattgatataatcctgataaataatcttgtaaatattgtgataaccttgtcttaatagaattcagcctaagttagttcttccttggactacattgaaaggaatccagggaagacccctgtcataccaaatttcaccctttgctaattctctaggtagaaaaagactgtgttatacgttgatctccttataaggtgtttctacagaccaagatgtctgcaggcaatgtttgggaaggctcttgtttgctaagaaatcacacccaaatggaaaccttcagaaaacaagtggaagccaggaaaagtgtccatcactggaaagttgaaatctcctttaagaaaatcaatttattaaaaggaaaatgtcttcccatcttgttatagtatgttataatatatcgaaagttcttttaaaagggattcttctacttagtaacaatatcatcatggtggtttgcagacagaatgtcatgctactaaatggtgccgcctcttccattggatttcagaagccagtggctgccctgctctgcacttcttcctcttcctggcttgacctcaattcagacctgtgtgtccttctgcacagtaggtcccaggctaccacctggagaggggaaaaagtggctatgaaggcctctaggaaaaaaagccaactccactaaagtttgttgagagggtgagaaagaaaggaggggagagggtgagcagaggggactgtcccttgggaccccagcttcccaagttctggcagtggatggtgtctgtgggcacttggttttcagttactcactgcctggacagtgtgtgttcttcctgccccacgtggccagccaacatatggctcaagcccacagttcttattttcctgtgtttacttgaaatctctctgagcacgtggaatttacagaaacatgcacttcaattatcctttacattgacccaaaatggtactgaggaaattttccagtggccctgctaaccctgaaaatggcaacagacaggtgcagaccgatgcattcccggtggggcggaatcctctttgcagcttgtgagtgttgcccctgtggtttggaaatacaggggaggactgaattgaatgagttcttttgttttgcggaacacctgagtttgtgtgtgtagcttgaagacccattctaccacaagaaacaaatttgcctcttaaataaaaggaacaggaaatagcatgttgttggctttggtgtgcatcaaggttgggagaaggaggagttgtgaccttactctgtcccctgcagcctcgggcctgtgtgtcctatgagcgagtgtcatggggtgcacgtgggctcactggctgtgtccagatagacgtttttgttcccctgcttcaggttttagtcctgagactaccaattaaaccatcccgtaaatcttccattataggtagtaaaacctaattttggatttcctgcgtgctctggtatcctgcctgattgctaccaggctggacctgtgaagcagacagtacgtgtattgtgccacgtgggaaagcccttttcttacatattcgggatttagtcttaattccctgactgctttcatcttaagttttaaaactcctgaggatagctatctggaactctgcagttgacttaattcttttcagtggatcactttgatgcaatgagtaagggaagggggcgctaagaaaagagtaggcataaaagtgggtgaagtaaaacaccaaagccactgtagctctgccattcttgctgcgaaggcacagggtgtgccctctctcagtgtttcatactccatcatctgtaactcagcactttcctcaagctggggagtaacagctgcttgggaaaacacatacatattttggaagtatttgaatcaatgccttgtttctacccctctcctccttcagtgacccaatacctttgaccaatgatgctgaatggtttacctgggctggaatctgggggatcaggagtggtgctggtgacttggtctttgtccccctcatcccttgcacatttgtgaaggtgaacttggaagatcagtgggtgtaacagtgttgcaaggatgttctgagtttgaggcagccagactttgttacctattaatacaaaggaaagatgaaacctatgcaaaagttgttcttcacgctggagacttggcaggatgtagtgtgctctgagaatctgcaggtgagagtttgagtgggtctgtgtatatggatttagggtggggtgtgaggtgaaatctatatgaacagtactaaaatgtttaaaacttacaagtgatatataacagcatttttgaactttagaagatggtgtcaataatactttgtttaccgtgagcatacagatgaacaaaagtatttaaattaaatctttctgcactcagacataatggctattgaaaagtaatgcatttcattccagatagtggaatttctctcttatacacatgtttttccccaaaggggatcatattatatatacacttttatatatatgtgctggcacctgttttgttcacttaccagcacattagaagtatctgcccatgttcataggtatgcttaatgatatttttaatgccacattacttttaaactgtctagtattccatcgtatgtctctgtcattataaatttatctacctagtcctcttctgttgagtattcaggctgtttctagttttctatattataaaccaggaattcccaatcttgagtgcagaatgcagatgcccaggtcctatcccaggccaattgaatcaggctgtcttggggtggggcccaggaatcagtattctcacatgcctccaagatgaaaattactgtttcaaaccatgctgtagtttatcagactgagatacgctcttgaaagtggaattgtgtgatgaaagatatgtatctttaatcttttgatatagactgacaaattacctttcagaaatttgttttttttttcacactaattttcactttaagctttaaggcttttaaaaggtaaataatgaaaaaatttgcatgtgcatttggaagaggtttatgtcatactaaataattatgttgatctgtttgacattgcttagtttattttgtattataacatgactgtgttactaacataacaaagggggacgtatttggtgcctctttccggttgctttagtgagactgtggtgggaaggggcagatgcaacagccctgatgatgagtgtcttggttcattcaggctgctataacaaaatactgtacactggatggtcataaacaagactttatttcacatagttctggaggctgggaagttcaatgtcaaggcactggcaggtttgttgtctgttgagggcccattttctggttcatagatggcatcttcttgctgtgtcctcaaatggtagaaggggtgaagggagctctctctggtcccttttataagggcattgatcccattcatgaagggtccatcctcaacacctaatcacctcccaaaggccccccagctcctaatgccattaccttgagggttaggatttcaacatgtgaattttgggaggaagcaaactggtggtacatgcaatgagcatgggatggctctgaagaactggattttatgccttttctgggttcacaactgactctcagaaaacggttgcctatctatgtatgcgttagtttattcactgtgaaattttctacatgttttatcactgttctattctagttgttatatttctcatgctaatacatagttgtaaaagtcaaatagtatttctgcgcttataatgaaaaatagcagttctctgccttccattttcccagagagccccctttcctagaggtaactgctgtcctcttagctgtttcttctgtcatttacctccttgttgatacatcactgcgttttcatgagcttttcatttggactttgtattagtccattttcacaccgctgataaagatgtacctgagactgggtagtttataaagaaaaagaggcttagtggactcacagttccacgtggctggggaggcctcacaatcatggcagaaggtgaaaggcacatcttacatggcggcaggcaagacagatcagagccaagtgaaaggggtttcccctcataaaaccatcagatcttgtgagacttattcactgccacaagaacagtgtgggagacaccaccccatgactcaatcatctcccaccggctccctcccacaacacgttgaagttacgggagctacaatttaagatgagatttgggtggagacacaggcaaaccatatcagacattatcaattttctcctaaggtagatgagaatttagctcatgcccccttcccccatctcctgtttctccatccttccaatgtaggtaaatcataatgttggttaagttgatatgcatttgtaacattattataactatgtaaatgttacttagaactgagtcatatagtgtgctgtaatgttcgattttttcaaaaacaataacttttcattgattttcaattgatttttcattgattttcaatgattttcaattgatttttcattgattttcaatgatttttttattgccttggtttttctaagtacttacaataagactcccttaaactccttggcagaaccagttcctcttttcagtgtgttagaatgaatttggtcatctctcagggtttttattgttttgttgtgggggagggtgctttaaggagccctgtgctcacagatggaaccggctgtttccaggcgtggctgtcctggcatctctgccctctggcaccctaggattctgttggttttcatgctgggtcccctgtctccaggttatcctgtcagcctcatggttggtgtagttcttcacattgatggcttggctgggcctttgattccctttaagaaacatttccctcacgatttggaaagtgaaagtgatgcttcatagactaccagctcttattgttgttatcaagaagcttgggatgccatcctggttcccatttctcttctctgaatgttttaggtttttctctttcatctcagtgtcctgaaatgtcacagagatgtgccttgtttagggtcttcttccttttattatgtggggtactcagtgggcctcttcagttgtgggaaatttttctgtatgatttctttgagaattttctcttccatttttaaatgttttctcttcttggaactcttgttatttagatgttgaacctcctctctgatcctttttattcaaggcatctttaactgtttttttaatggctgtattatttgttcttatctttaggatcttaatgatagtttttttttttaaagttaaaacatctctttttgctccacattttttcttcgtgattgttagattttggtcatcatttctaatgcttggaagtttttcacaagtgtctggtggaccttggatgctcttcactaggaaataattcagaataattcactaggaaactgtgtgcccaggtggggcttgttggctgggggtgtgtgccgtgatgggtatcagcacctgactatgtcattggggacccataagtgactgtctaagtagctctttctcttgggttggtcagcatctcctgggggagaatactgctgttgtcagctgtggaaagggtggtggaatgagggtggggttgttagagcctggctgcagggttctgagggtgaagtagagggaagatcctgggggaggtaccttgccattcacttggtcccccttttcagtatgttgcctcattccctcactctgcagagcctggagtccctgatttctctctggagaggaaccctaaattacctgctaggcacaggatggttacctggctgcaggggatcagaaaggggatgtgggaggaggagggagcacttgaatttcccctttctccaacactcatacactctcatgttttcagccccattccttgccctgctcccaccctctgagtgacctcaaatttccaaagctctcagggtcgtatgttgcaaattgcctttccctttactgactccccccatcctctggcagggaggtcccctcactcatcaactgccattctcttatttgctttccatcttccaaattttgcaaacatcttccacaggctgttgtctcttctttcttccctttgtccatttgaatttctacttttagtgatattattctagaggtaagcccacaagttcaatctgcccttttttacctggacctgttacattttagagatgaagtgagttgcaagtcttgttggatgagtgctgcattctaccacggggtgcagtagttgtaagtgaggagggccagatgcacgcaaagtgataagatgatcatgatgaagctcacgcttatagaatgccgactgtgctgggctttacctggattaactccccaaatcctcacaacaacccactgggaggggctctgttattcccaactcacagagcaggaacctgaggcatggaatcatggagtgacttgctcaaggtcccatggggacaagtggctgagctggacattgcacccggactggcgcacccagatcggaggagtttcacaaaccaggcccccctaccagatcttcccctcagcatttcgagttgcatgtgctgtgtttcacaccttaccttagatcttcgttttctctgatatgcccaatgcattgtgctcataggtttggctgtgatgagaactctcttgctcttcaatccactcagttaacatttgtgtagtcctggatttcttacttttattatctagaccccagcataaacttctaatgggcaagtgggaacccctgttggaacacacacttgcatacatacacatgtgtacacacacacacacacacacgcagaaaaagaacttgtgaagagacagcataaaactaacagataagaaaaagacatggatcacaagactaaggacaaagcaagtgaacaggctaccacagacagttgatattacagtaagttaaaaacgaggaaattattttaaagtcttttattattattaacagtattgatgattaaaattataattaataacattaacataattttagttgctctttcttaggatcctgtagacagtagcacagttgtcaggacaatcttgcatgatggacatttttatcctcattttatgttgaggaaatggaagctcagaaatgttaggtaactttccaaggacacacaattagtagtacagtgtctaattccaacgtgatcactcatttcaccacaatagcttccaaaatattgagcccaagtaagtagaaagactattttgaacacccagattagtaagaaatccactggattgtttcttaagctctgaatcaaggagtttttattcagtcaggttccgtttgccaattcgcaggtgggtcattttctctggcaagtttcaacagaaaggctggcagaaacacaaaatgacacacatatgggatgcacacacacacacacatttcaggagactgaagtctgggaaagcaatggttttgagatgctttttacactgactagaaagcaaagagaggctagtggctgagcagaaggatgctgtccagatcttcatctagactagattatcaccagccagaccagcgtgcggttccaagcctgcctcccactgggcagcatttccacaacatctttcccctccttggggctttatttccatccccatttaaagtctcccatttgttaagaatccatggttcatgtttgtaaactgtaacagtgttcgcctcttcctttttgacagtttgttgtattacctaataaatatttttgaataaacatttgcttccttctaagcagggggacagccaggcagtgtccagccctctattagagtacagggccccggaatccaggttgagagagttctttttcctgtcaggctgtgggccgcagggttgggaacggagctttttgggtgacatcctgcagagctgctgcagccagcccaggtgggagaggagaggttggatgggtttccaggggccagagtacattcttcctgataatctccttagaaatgagaaaaagcttccctccggcttttatagttccagctttcatctgctcttcacccacaggtgcttcattccttggcttgagtaaataccttcagggaaaaggaaccagatgccactatttttaaagctgaggaattctttgttcaaataaaattttgcataaaagcccaataagtagcccttcccccagagggtgaactcttttggtgggagccggaccctccttgccctcctgctcctcctagcttctcttctcctggagacgggtgtgaaaactgctagctgacctcttctgtgcatttattgtgtattagttcattcttaggctcctataagtacataactgagaatgggtaatttatgaaggaaagacgtttaattgactcacagttccaacatggctggggaggcctcaggaaactttcaatcatggcagaaggggaagcaaacatgtccttcttcacatggcagcaggaaggagaaatgctgatcaatagggggaaaagccccagataaaatcattagatctcatgagaactcactcactatcttgagaacagcaagagggtaccacccccatgattcagttacctgccctggtccctcccatgacacatggagattatgggaactacaattcaatatgagatttggatggggacacagccaaaccatatcatcttgtatgggaaaatagagacctagaagaatcacctcccccaaattgtggaactagtgattgcaagagctgggaccctagcccaaggcctcatttcctgaatattattcaacctgagtcatgctagggtcagctatgtttggacataggtggtaatagtggcggactgctgccaccatgacctcaaatgtcaatggcccagctctcaactctgcagtcaaccttacctaaacacagaaaaggttattgcaaagttatatgccttccagattgtattttatgctcaataattgtgctttaaaaatatcacattgaatccttttgtaacagtttttggattttagaaatgagaagtttattattattatgcttatttctttgtttccttaaaggaatcatgcctgtgaagtttcctcttggttactttttcatttatcgaattactcactatttctttatttatgcatatatctggtgttttttggtatctcagagtagtttgattgtttttgctttttagtgtgttatatttgttacaattgataaatctaggttggcacatcattatcacctaaagtctatagtttacattagggcctgctcttggtgttgtatgttttatgggttttgacaaatgtgagcctactattacagtaggctatactattatagtaggctcacatttttcagaaaggattcagtatgggtctatgttaaaaacagatcctactatgatagtaccatatggaaaagtttcactgccctaaaaatgccccgggctctccctattcatccttctcttcctcctcactaacccatagaaaccactgatctttttactgtctccttttctagaatatcatgtagttggagtcatatagtatgtaggcttttcatattgacttttcccttagcaatatgcactcaggattcctccgtgttttttcgtggtttggcggctcatttcctttcattgctaaataatattccattgtcttgatgtgccacactttgtttatccattcacctatataaggaaccttggttgcttccaagttttagcagttatcttcatgttcttttcaaagcttcagtgaaaccctgtaggcaaggattctacagtataccttccaggtgacatgctgtgccattgtaatcattattgagattctaaaaatggatcatcaatctgcatccatgcaaagggagctgactatttttaatagaataagtgttacagattcattataggtctgtgttaaaaacaatggaatattgggtcttcgtgcaggcaacatggaagtcagtagtgaagattttcttagcattctgtcctgaagtcaccctgagaatacagatgttctctccacttgatgtgccttaaaactggactcgaagagtttttggttggaggagaggttgattgttatctacaccagatatttggggtctagttagaagtttcttcttggcattcttaatgctcacattttctcctcctgcatattcccagggacagggaacttactccctcataaaatagccattcccgttatgcacagctgtgtttgtgagcgtgaactttctcatatcgacctcaaatatgcctccatcatcgtatctacttttccctcctcgaataacacagtgaagtggcgacttttgctcataatggggactaggaacacctagaatggtacctagaaatcttacagtgaatagtggctgaataatttcagaactgaataaatgaatgaatatttgacttatcttcatttatttcaaagcagtatttccttaaacttctcttttgcagataaaatacaactacttattttaacctgatttcctacaatatgtattttagagttatcatattggttttatttttgtggacgtattattttttatcaatgttcttcttagagaattatatacagaacaggccctaggaaatctgagaccattatattttgtgatctgaaccttatggttcttttgaggcagcagctttagggcagcccatcacactgcctttggaaacaacctgatttttttttttttcatatcaactgctgccaatctacatccctctcattcagtaaaaagaaggacctttaaaacccaaaacaaatgaaataattcggcacttcaaattgtatcttatgaaattgaaggagatgcagatgatggttttctcagacatttattttctactttttattttcatcctggtaaggaataattaaaaaatagatgtgtaaagcttctaaaacaggcctcagaaaacacagaaaattgagaaggcaaaaataaataagaaaacaaaactccatacaaacaaataaaaaggcacccaaccaaacataaaataattcatgtgtgctgatatagcatggagcagggtatgtgaattcgttgataacgatgacatttgagaaatgctcgctcgtgccatccagtgttgtatgctttacacacatgaactgatataatccatacaaaagctctatgaagaatcactttttaaatgattttttttctattatggtaaaaagaaatgcataacatgaaagttaccatcttaatcatatttaagtgtagagttcagtagtgttaagtattttcacattgttctgaaacaaaactgaagaaattttccatcttgcaaatctgaaactctacactcagcaaacaataactcccctctccctactttctccagcctgtggtaacccattctattttctgtttccatgaatttcactcccttagatacattatataactagaatcataccatatttatcttttttttgtggctggcttatttcttagcttaatgtcctcaaggttcattcatgttgtaacatgggacaggactttcttactttttaaggctgaataatattccatggtatgtatattctaaatttcatttattcatccatccatggacatttgggttgcttctacttcttggctattgtgattagtccttccaagaatgtgggtatgcaaatatctatctcagttagtttggatatatggacacggaagtgggatttctggaccacacagcatttctggttttaatttttgaggaccctccatactgttttccagaggggctacaccattttacaatcccactgtattagtctgtttttatgctgccaataaagacatactcaagactgggtaatttataaaggaaagaggtttaattgactcatggttccacatggctggggaggcctcacaatcatggtggaaggcaaaggaggaggaaagtcacatcttacatggcagcaggcgagagagagagagcatgtgcaggggaactcccctttataaaactatcaaatctcgtgagacttattcactatcacgagaacaacacaggaaagacctgctctcatgattcaattacctcccactgggtccctccacaacacgtggggattattacaattcaaggtgagacttgggtggagacacagatccaaaccctatcacccatcaacagtgcataagggttctacctcctctacatcctgaccaacacttgtttttaatttttaaaaaattatagtgttcatcctaatgggtgtgaggtgacatctctttgtgttttcaatctgcatttttctgatgattagtgacattgagcatcttttcatatgcttgtagaccatttttttaatgaggatgcacttttactgtgcccattttatagataagaatgtagaggcaaagaaaggttagtcagcttatccaaagttatattcaggcgaagtgatggaatcagaatttgcatctggatggttggctacagagtcctgctttgcaatcactatgttatacccttcttaggggagccatgttacaagatgggaggatgtcctcagatgccgttccttcaagatgggtaataaatattaaatataagggaaggtttcaagtgctttagaccttgagcaacgactttctggaatgatgatgttaatggagtgatgattcaagcagaagccagttaaactgggtttccaaagtcaagcacaccctctagaactgtctgtgggattcggtttgcaggtctcagggctgacgtgcttcctgacttgagccacaaacctggcaggagagaggagatgccaggagggttgagctgggatgagggtcacggctaccaagaggtcaggataggggtgtgggaactttttgcctttatgcatagattgctgccaaaatgaggggtgaaaacggtacggaaatcaggtgtgcacacagtaatgcagagatgttctagtgttacagaggattacatggattttatccaaaggaaaggaaagtagtaaaagggaggtcaaaattgggaccacgccatcccttaaaggacgggaaggctataaaaatcttcccaggctgttagttatttcatctctgctgaaaatgacatatatagcagcaacagaatgttcagttaccactaaaagcaaaatttcccccaatgtgctttaaagagacgagacgtgtgggcgtttagtgttactgattcttcctgattcctttttttttcaaccaaattttctgtgactcatagaactcctattctctctcttaaccatgtgagtatgtgaaaccatgtacttggcccgcaacatttttaaccaagacaaccttaatgggaaatgaagtgtggggaatggtgtgttctgaaggtgccaaatcttttttctcaagggcaagatgcagtccgagttgaaggaattggaagagggtgtgtggtcaactccccggaaaaagcaaatatttgttacccacctgaaacattaggaatgagccagtggtcacatcctggtttctgccaaggctgaatgcagcccagattgtcagagctttatgctttccattccaggggtttcaaattctacaaaatgcataggatgaggcattaagaaagtgaccctttatcttcatttttgttcttcttcatttattttttctttgtagtgcttctcagtttagctctacttcttcctgagggtatatggtgaataactatgtagctcacatccctatgaggtctgaattcctcttatgttgcaaagtgagcttaacaaagaagaaagtcctcagaaccatttcttaaagcttcttctttttgactgtgatcctaggaaaacataaaggtgtgcagtcctgtgctaaaaaacatttgcactcaaggtgattttcaacttatgcaggattggttgttgttttcagtacttgtttgtctcttcttcctcaatgttagctgaaaagatgggtgcccagaacaaagtcaacattgcccagcttcccttgaagccatgtgcaactatgtgaccaagttctgaccaatagaatggaaggactgtgtgccacttccagaaagtatccctcaagggaaggttgaacttccaggtagaggagtgcccttgtccttcctcctcccacctccctgttgcatggctgagatgatgactggagttggagcagccatgttggatcataaagaggaagccctgtgttgaggtggctgaatggatggaacctgggtccctgataatcataccaggcctatctgcttgttttcctatggtttaagccaccattattaacaagaaatctactgtggtaaaacatacataatataaattttatcatttatctatttttaagaatataattcaggggtatcgagcacatttgcaatattgtacaagcatcaccacatcatttccagaactttaaaaatcatcatcccccaaaaaactctttacctgttgaacactaattcccccttccccctttccatagcccctggtaacctggattctcctttctgtccctgtgaacttacctaatctaggtagctcatgtaagtggagtcatatgatatttgttcttttgtgactgacttacttcactttgcataatgttttcaagggccatccattttgtaacatggattataatttcatttcttttttaaggctgagtaatatgcccgtgtatgtatagactacattttgtttacctgttcatctgttgatcatgaataggttgtttccacattttgtttattgtgattaatactgttatgaacattgatgtacaagtatctgtgtgaattcctgcttttgattcttttgtgtatatacccagaagtataattgctggatcacatggtaattctatatttaatcttttaagaactgtcatactgttttccacagcagctgtactatttcatgctcccaccagcatggaacaagggttccaatttctccatatcctcaacaacacttgatatattttttttctactggccatcctcatgagtgtgaagtggtatctcattgatgttgagtatttttctatgtgctcattggccatagaatggtctttggagaaatgtctgttcatgtcctttgcccatttttgagttgggttgtttgtttttaagccaccattgtttttaaaaaatcaatgttatcttctgtcacttgcaactaaaatggattttaactaatacactgccctgctgctttggttgtgatgagaatccattgagtgtggaaaggtttgcacctttcatagagacctagtgtatcaatgctggaagccacttaaaattgcctctggtttaggagcagagagaatgggcaatctgccttagtttacttccctggagaaagaaccagggatggaggagcttatgtctcctggcctctcatccaggtgtttccatctcactgcctcccacaggggaactctgcaagcaggcagctgggagcctgtgttcccttgtccaggggctgcaggactctgtaaatagtacagtctgtgcaggaaactctgctattgaattgtaaatgttattgcctaaaacaggtcatctcttggctttaacagtactagtatactgataacggcaccaatgataatgataatttgtttagaaaggtttggaggaaagggttactggggaggccctagtcctctaaagctgtgtactgctgctttatctcttgacaaaagagaaaaaagttttaatgcagatctcatgaacagggatggtttaatgagaaatggtgtgaagatttagtctgtttgttgcccaccacaaactcagccttgttgactctggagcacgaaaggtgtgattctgagagcttgtagcttctggagggaagggacagggaagttccatgagagaagtgggggcatgagagtgcaggtgtggtatgctcactgtggggagggagccaccaggttccagacagcaggtctctgttgtgcttcacagtttcccccaggagggggactgcagccagctctctcttttctccacgcagtagctgtgggtgtgcaggtggctattgagcagggacattttgtgttttagatcgacccctccctcggtccttagatcatcatgtctttcattgatgtgttagtcattctgggtagtgtatggagcccatcagtcattaatgctcatgtggtcccttagatgggcaaagctcttgacaatgttttttaaatggttgaacttgtgtgacccttttatgactctgtggtctttgtttctaatgacataggcagcattcagggtagaaaaacaactataaatacagagaagcaaaagaaagaaaaagcaggctgtgtatggtggctcacacctctgattccagcactctgagaggctgaggcgagtggattctgtgagctcaggaatttgagactagcctgggcaacatcgcaaaaccctgtctctacaaaaatatacaacaattagccagctgtggtggcatgcacctgtagccccagctactcaggaggctgaggtgggaggtgtgcatgagcccaggaggttggggctgcagtgagccaagatcacaccactgcactccagactccaacctggatgacagagcaaaaccctgtttcacaaaaaaaaaaaaaagaagagaaaactccttgtcatttctctccagagttagccactcttattattttgttttgtatattcccagactcttctatgcatggttatataaagatatacatcaaaaaattaccacatccctttcttgcataggagtattaagatattttcaaatactgaggatgtcagacagataagaaagtctggctgtctaattcacatctttaaaaacatgggacaaaactcgtttcctaccagaacgctaagagttcatttcccatttcaaacattcttgtcagaatctttccccataacagccatcaagccttgcatgcttctacggttctttatgttcatcttctataatatcacataataaatgtaaaaaccttgaatttaatgcattagtttttatatactatgtctctaagcatgttgttcagctgattttttttttcctcctggcaagactttctgaagaaaagaagcaggttgttgatttattttcattgttatctgaataatgatttcacagtattttcctgtcattacagctatgctatcagcccattcttaaaaacactgatttgtgatattattaaaaagtggtactcaagcttcctttttttgggttacagattcaccgaacatttccaagtagacttctttaatgtagttttacattaatgtcttggcaattttatgatttttgtttgattgttcattttgtttgtttttggttttagtaatgtaagtgctgctttacaggaagccttaagacattcatttttagacatgaaatattcaacatctacttttgttgtctttttaataatactcttttttgcaaatttttttttattctcggtatttaaaaaatttttttatgtaaatgctactcaagttttgatagtttcattgttttgtttgccaatacatttgttcaagtgacctacagtgtttttagcactttgctatcaattatggctgcaaaactgtagtttatggctacataaactataaaaatttgtatatgagggattatactttcaagtaaaatgaatacaaaattttttggctttcatttcttcaatgtcaacttctttgtcatcatttggttactgtgattgtcacattcaaaaaagatatatgtttttctgaccaaaaagaggccatcaatcaatcaataaaggttataaatacataatactaatttgacttcccttatttagccagtaatgttaaactataaattttaaaaagccataaacatttaattaattaaattttaattattttcataacgtgcttcccttttctcagattatgaaaataagttatgaaaataagtgcttcccttttctcagattttcatataatttgatttatccttgacaaactgaccttaaaaggtcacatgttgtaatgtggccctaccaatgagtgcccaaatgtgagtaatgctgcagtgtctgaagtggtcggcaccttatttagaggaactggagcactgagctcatactgatgtcacagtgatgtcaacttgctctaaaattttacaagcccttcttactttccgtacttctctcatcatggtcagtcaacattttgcaaaatggcactggtctatggattacactcagtaccactgctacagactgtatcatggtttgcaggtgactcagaattcagtccttccacactgaatattattatcatgacattttgggaaaagtgagtgttggccaaacgtggctcacgcctgtaatcccagcactttgggagaccaaggtgactggatcacctgaggtcaggagtttgagaccagcctggccaacatagtgaaaccctgtctctactaaaaatacaaaaattagctggaaatggtagcaggcgcctgtaggcccagctactcaggagtttgaggcaggagaatcgcttgaactgggaggcagaggttgtagtgagccgagatcacgccactgcactccagcctgggcaacagagtgaggcttggtctcaaaaaaaaaaaaaaaaaaaaaaaaagagcttcaagtattatttttattgtaatgggctttttaaagctgcttcaatgagtttcatctcagattattctaaatacgcaccatatcgccaatcatattaattagtaagtatctaagtaattgagaatgctttgccttcaataaaaaagctggtgttgtatcctggaacctgttcaaaaataaagtcttgatgtgaaaatgaatataggttgagatcttgagatcaactgtcagaagtcaggctggcttgggacttcctggaagcagcaccaggctctgcgttcaagtttgaggagcgttctgccttctgctgttgtggcttcctgcaatttaaggctcgctgcttcacactcctggtctagcaccttgacagaaaatgttccctaagggatgtttcagcctctctcctggagaacaaggccatgaataaaagaggaggccaagtgggtagcattttaaagatcaaggattcttaaaaactaatggtacaatgaatacctgtttaacaaacctgcgtgttctgcacatgtatcccaaaatttaaagtaaaattaaaaaaaaacaaactaatggtgcaagtagaccaaataactctgttcttcaaacctttacctctaagaggtgaatttatatatttttaaaattttgtattcttccatcacaagcctgtaatgctgaagatgagtattctgtatctaaggatgaaatgagtcagcacttttttgaagtgtacctttatctttaaaaactacagctttatgccatatggtttggatagagtctatttctgctctaaaaaaaaattctcaaaggatgaaggtgggttgatgtgtgaaataatgtacttcttcctcaagcagtgatgacagcacattgtcttttgggacaggatagcaggaatttaatattaatatatatttttaatttcatacatttattcattcattcaacattctgaacaaaaaattttctatgtgccaggttatttgctaaatactggggatattaaaataataaggcatattctttttaaaatgcttatagtctagtgggggagatagccacataaacagaaaactttaatacattgtgataagggctgtgatgtttcaagtattattctaggtgctttacatttattaaaatatctattccctaccacatttgcctcaagtgagtgcttatattatcccagttttacagacaagaacattgagatacaggaaggttaagtgtccaaggtcatatagccagtgagcggtgctgagattcaaatccaggtcgtcccatcacagaacctttttcccagccctacgctgtgaacggaggtggacaggagctctatggagaccacagaaggggtgtctcccagcagagctggtgcatgaactgtgtctaaggggcaggcaggagttcgccgggatgagtagggaggagagtttttttattttttgttttactttaagttctgggatgcatgtgcagaatgtgcaggtttgttacataggtatacatgtgccatggtggtttgctgtacctatcaccccgtcatctcggttttaagccctgcatgcattaggtatttgtcctaatgctctccctccccttgtcccccacccacccccgacaggccccagtatgtgatgttcccagggaggagagtttaagtggcgtatgccagagcatgcagccaggtgcttggtgtaatgtggagacagccagggctttgccgaggctggatcatgggatgggtggtggagcatggccagggatgatctagaaagtaggagtgggggctgccaagtcatgtggttaggctcacgaggaggttttcttgaaggcttcacatatagcctgaaggatgaaggccgagatgctttaataaataatttcactattccaaatggaaaacatctcaggaatgttcttatttgatatgtgattactgtaactctgggatctttaaaaaaattattgtaaaacattagcttgggaggaaattatgaacttcaattttgtttcatcaaagaaattgcagagatggccttgaagaaatctaatggctgttaggtattgccttgtttatttatggaatgatgctccccatgggtcaaaggcaaggggcccacatgcacagattcattttaagttcgacccctgctgggctggtggcaacctttgccttacttacatgtttgctgtcagtgctgagcaacttaggtgtttcatttctggagggaggaactcactctgagtctaggacctcacgctctgctaccaggacgcctgcaacaaactaacacacacatgagctctgatgtacggtgtgactggaaaatatactgtgttattccagtggcaaaacccccaacactgccggatggggcaaaaagtgaaattgtgttttgaatttgatgaagatttcagaggtaaattataaaaatcttaaatttggccagtctgctccatgtttcaatccaatatgcagggcaagagagatgaatcttggtgttcatttcctttatgtttatttcatgcaaattttatgtgtatgtgtattgtgtgtgcagtgtgtgtgtgtgtgtgtgtgtggtgcgtatgtggtgtgtggtgtgtgggtggagtgttgagtatgtgatgtgtgtgggttatgtgtgtgctctgtggtgtgtatgcatggtgtctgtgtgtgtgtgatgtgtgttatttatgagcatgtggtgtgtatttagtgtgtatgtaatgtgtgtgtgtgtggcatgtatatgtgatgtgtgtggtgtgtgtgcatgatgtgcgtgtgagtgtatggtgcatatataatgtgtgtggtgtgtatgtggggtttatgtatgatgtgtgtgtgtggtcttgtgtgtatgtggtgtgtgtggtgtgtgcatgctttgtgtgtgtgtggtgtgtatgtaaaatgtgtgtgacgtgtgtgtgtgctgatgtgtgtgtgtgtgtgtgtgtgtggtgtggtatggctgagcatgtggtgtatgtatggtgtgtgtggtatatatgatcatgtagtatgtgtggtgtgggtgtgtggaatgtatgagcacatggtgtgtatgtgtggtgtatatgtgattgtgtgtgtttgtggtatggtgtgtatgtgatgtgtgtgtggtgtgtgtggtatgtatgagcatgtggtgtgtgtggtgtggtatttatgagcatgtggtgtgtgtggtgtgtatgtgtgtggtatggtgtgtatgtaatgtgtggtgtgtatgtgacgtgtgatgtgtatgtgtgtgatatggtgtgtatgtgacgtgtgtgtgtgattgtgtgtggtgtgtgtggtacatatgagcatgtgtgcgtggtgtgtatgtgcgtggtatggtgtgtatgtgatgtgtggtgtgtgtgtggtgtgtgtggtatgtatgagcatgtgtgtgtggcatgtatgtgtatggtgtggtgtgtatgtcatgtgtggggggtgtgtgtgtgtgtgtgatatgtatgagcatgtagtgtgtgtggtgtgtggtgtgtgctgtgagtgtgtgtgttacctactgatgttgaaagagacctgggacccattccctcggcgcggcagagccctgctttcctagctgtgagccggccttcagtcctctccactgacttggcccggaaagcagcaggggccctgtttggtgagttacgtttacacgtggagcatgagaaggcccacatttggctaaaaagagtacaaatctagtcccctgctgaatgaaggcctgtgtggttgtgcactgcacagtggtgcctgagctgctatctgacagcacgtggtcacctttcctcccgtgcatgtcctgggacagctggggctgcacctgaccatctgggtaggactcaggctcctgcaggctcctggatcaggctgccttcctgagcagctgcgtgtgtttacctggagatccgagagagcctctgtctcctgtaacttcgcaccttgtgtactcagagtcatctcgatgtcagccattttttcttcggagcaggttttcattgctggaaaggcatgagtggggactcaggggagcatctaagtagactctggaaattccagtggtaaactcggagcatttttgtatattgccttgggctgaacttgcatagccatctggaactctcttaggcttggtggcctgatatctatgagggagactaaccctcctttctggggggatctgccagaagagatgggttttatttttgtattagtcagcttttgctgcagtagcaaatgatggcctccaaaagtctcagtaatttgtaacagcaaccacttgtttgtcactcagaggacttcaggtccctggagctctgtcggactcagctgggcctaatggaggtccctgtgtcttttattctgggtcccaggttgaagggacagcagctctctgaggcatgctgctctcatggcagcggggagatggcaaggggcaagcagaaatgcatgattcctcttcaagttgccacctggaacggacacactttcacttttgctcacttttactggtcaaagcaagacacctggccaagcccaaggttcctggagaggaaagtgcgctctctactgccaggcaagcacaagtcacaagatgacatgtggagctgcatgaaaggaggtaggacataagagttggggacaataatctacactaatctgctggaatttatttatcacagaagggggtagtctgttgcttcctaagtgatctcatcccatcccatggcttccaatcccacctacaccgatgactcccagatagttgcattcctgggcttcccttcacactcaaattcctgtatccaaaattttacttgacgtcttacttggatacccaataagcatctttgaaatcctccagtagttcgagttctctcaataaatgctgaaaactgatggcatcatccttcactttttttctgggaagccatgagtaaagtatgtctaaggtccttcttactgaacaaggctgtgcttgacagaatgtctagaaggagcttccaaacagattctactttccaagatttttagacctgtcttgttttaggactaaatttaccagcctgctgctgcggaaccactctgctccccaccacacttgtgtactgggaaacttgatttagcctggtggagagaaagcctgtccttgggcaatagtgaatgatagagtccacgtttaggcctgcatctttctttctccaaaatccatgcttttcccactacacaaatgtcattgataataccagctactcatggcatccttaaaatcttggtgatggggatattttattggttaggaatctctatttttaaatgtattaaaaattccattccttacctgtgagacaatgtaacctgtaaaagtaagtaagaccattgttcttttttattggtcatgttcaaattacactattgctccttcctaagcagacgagctggctgcgggcctgcagagtgtgctggggattttgcagttagaagccagaagtcaggtttggccgtcatacatgagtaggagggttgaattggcattgtttttacgtcctgggagatgtgagcaagagcaaaagaataagtcatcgcctttctgttgcataacctcttcatccccacaaacgaaccaaaccaaacccacaccagccatatcaaaccagatcagaacaaagagccaaacagcagaagacacttgctgaaggcactagcttatgctgaagaaatgcaataatgatttatggactctctgtatctaacactttaaatgttgatttacggaggagtcagagcccagatattccaaccaagtgcagcactttagcttggctggcgttctgtggcgtttcaatgggattttcactgcatactttcccattcaagtgtgcaaagcatttcgagtctgaataatactaagcacattcaagattcattcaaagactgcagactttgtcaagtatcttcttttcttctgggattgattcaggcaattagaccataacctacatgttttcttcctcttttgtttatgttggtattctcataataaccatgacgaattatcttccaggataaaatgaatgctccaggtactggaaagtgatgacaatgatgctacattaagccacaatgccataaattcacagatgtgacagtatactgaggtgtggcaatagctgactagctaatttatgaagccgtaaggctggtaataaattctggccctataaacagtgtcaggcaaggtaggctgaaatagaatagattcaccaatacattgtgtagggcctcctgagctatccctgttagaatctcagaaaagtgatgcttttatgattgctagatctcctgtgccatttttttggggtctttaaataaatgactaagggccacagttttaattagctgcaaggccagagagtgaagcaggctaggatcacagtgagattaaatgggggagcaggagggaagagacaggggagggagtaagaggaatagagaggaggaggatgaggggagggagcaagaggaatagagaggaggaggatgaggaaatgtctcagagaaacacatcccatgtcttggagaaatatgtgcccaaggctcttctctggctctctggataccaggtgtgtgggctgtaattctagactccattgacttatgaagctgaagctctgaagtacattcagcttagtatctggactggctggagcatggggaaggaagtcggtctacaggtagagtgtgtcattgacaccatcttggagaagtcagggaagtggatggtggtaggtcacaatgactgttggcttaatgtgaggtgtctgacagactcagtggtcttcccactgaacccggctttgcatgaccctggttgaattgcatctacttcatgtttcaggtccttatccagggactaactttgacttattgagtacttgctaaattttcaggattgggttctgccctttaacgcttagttttcctagcaaccctggtgggtaagtctaattttattctcatttgatagttgatgaaacagaggcacaaagttgtcacttgagcaatgtcacactgctagtgagtggtagaggggagctagaacccacatggatgtgactaacctctgctcactctgtctcctgccccacagagggtgatgctgagaggtctgtgttgtaaaggaggcagtgctgttgctgatgctattgacagaatggctacattacctacaaaccattgcctttctctagaagaatcctattctcaaggagttagtattagccattttgttaagttctgttttaaagttgttcccccccaacctccccgccaaatgagagagcttgcctgctcttgtccacttagggaccttatagttaaggtgtcttaagatgtcaccaaccaaaccttttgcttttggggccagaaaaggtctattagagtcaatctgctccacgttactttgtgattctcactctgtgccactttatccttgtcagttgttattttaggggcatgcattgttttaccggttaatgatcctgatcttcctgttttcatttttatctttcctgaatgcacctgttcgttccgagatgatcatctgccctgtttcatgacaaggctgttttcaccactcagtgcctcttaacaggatggtcttgctccttgcttggctgtcaacttctcactggggctgcattcttccagattattctggcttagtcttgcttttccagactcttctactttctgatcctactgttgatggtctggaaggctctgctctccccattcccattgtcaagtgggcaaagttgtaaatggtactccatgacacgtgtgggcttgggcctaccccttattcattcttttaagcctcgtcctgccaggtgctgctccaggctggccttgtcctgcctgtggtctcttccttctgtcatctgttgtctgggtcggtgccactgtgggggaaaacaaaggccttccctaccttcctgcccagagacagattccatttagttcttcttcagcagtggactctaaacaaaccctttgggaaacaaagacaacagatatgaacatgacatatcaaatatcaacaatgggatggggatggtacagaaacagcaggacatctctgtaccatctaaatgaaatagaaacctttccagtgacttgagttagtacttggaatagaaatgagttcaggacttgtcctgttttatgttcagtgaatgttatatgaagagatgaaggggtgaggaagaaaggttaagcaagcagaatgcctactatatttatttatgctttaaacacatccattaagacccttgacaatgaaagcatggatataattttaaagaacattttgcatttattaaacaaaatgttctcctaaatgtcagtgatggactttagtgtgtgaagaattcccaaccttgggcaggtcatccgcctgccctttccatgtggttaagggagaggctgaacacatgggctcatttcaggatcctcctggaagtccattttggatctgttatggttggaggaagggctggaaaagaaaatgtgcctcatgcctgaggtgtgtttccccatgagcagctctttccagaaggattttttcattaaattgttaaaaattgaagtcatatttatggtgccatcaaatcttagaattggaagaaacttgatgtcatctctgtcaaaattcatgagggaataaatgacatttaccaagacacagccgcattattatgttatcccttcgtggaggtcattcagaggttgggtttggagaggcagcatatgatgtaactccctaggtctctctgctagaaattcaggcaggtaattttagaagatgtcatatccctcaatatattttcatgcatagattaattgtaggtaagagttatatcacattatttactttgggaatctccagggaatttcttgatgttctgagtagtagcattgttggaatcccttggctccaagaaaatttcagcaatcaaaactgaactgtatttaaaataaagagcaagccccatggacgaaggggcatcttagatggtttccaccatgggacttggagggcatttcctccaggcagtgcttaggataaaaatgaggtgggggagggtagacttccctccctcttagaggttgaatgttttctgagcagacttatggtcagtttctttctgcatccttgtccaatccaatccaatccagtccagtccagttcagtccagtccagtccaaaccagaagtcatttacaggccatatatcttatacctggaatagtgctaggtgttgggaaggcactgtctcggtgttcatggtcaagtataagcaacagtccatgctctaatgtccctcttatctattcttattcatgaaaacatttttttctgagtctcagttcaaaggtatgcaaaattattgagacaaaaatagctttgtgtgttaataataacccatcattcataaatcattcattcactaggtgctttgccgtacacagaggaatcccaatgatcaagacgggtatattagtccattctcatgctcctataaagaaatacccaagactgtgtaatttataaaggaaagaggtttaattgactcacagctatgcatggctggggaggcctcaggaaacttacaatcatggtggaaggggaagcaggcaccttcttcacaaggcggcaggagagaggagagtgtgtgaaggaggaactgtcaaacatataaaatcatctgatctcatgagaacttactatcatgagaacagcatgggggaactgcccccatgatctaatcacctccctttcttgacacgtggggtttacaggtccctcccttgacacgtggggattacaaattgagatgagatttgggtggggacacagaaccaaaccatgtcaataggtgtgactacagtgcctgaaccagagagaagctgttgctgactcttggcagctcctgagagctgactgtatgcatctcttctcaactctgcattcagtgacatcccattggtagcttgaagttgactgtaatggaagtgttcacaccatggaaattggcagtcagtacaaaccagggcttcctccccaaacaaatgatttttcaaaaacccttttgtcagcacaccactgccagacactctaaataataatcactctaataattgtcagctatcatttattctatgcttctacatactagatgctttacagacttcatctcaaaatctttatagctacctctgagatggtgtctactaattagaaaaaggtcacaaaactagtacatgtcagagccagaaccagaactaactctgaactgaagaaagctcatgattctaccctttttgctttactgcctcctttacttgaagactttttcaaagccccatgcttgcattttttgagatgccttcccaccttcacctaagggaatgggactcaagaaattttaggctccatgacaagtcagttcacatgacattttgttcagataaccattttattcagtgaggtaattccgcatctccccatttattttatatcatctcatgtgacattttatctattggtgaggcagcagtgagttttgagggcagcactggtattgccagtttaattctaaaggcagtttatttgctttagtaaggtgaggaattaactggacatccatggttttatggtgactttctgattcttgttgtactgaataatagtgtctctaagaatcaatttgcactggccttttcataataagattgttattattatgagatcagttgttaggaaattgcttgggatgggatttgggtatctcaggcagtgatgtaatctttgccttaataataattaaatacctaagacttctgatacttcacctctgatacacacttacacatttgtgctgagtagagccggacaatcttgggcttcccccagagggagagcctgtcccaggaatctcatccaatggccaaccagaataataccttggccttgggacaggatatttccccaaaggagggactccctgctgaggccacgctgaccatgctgtgtcttttcttcccaactcaccgatcagataaattggccttcctccccacatgtgtgtttgtcttgcctaaggagagacctggacttgagcaatcatggaccagtccagggctcaaggaagccgttcgtccccaacccagtccccttctagccactgcctgccacctttgcaggtagtttcatctgcatggtcccagggtggctgctcaaggaagccattcatccatcccagtcgccttctagccactgcctgccaactttgcaggtggtttcatctgcgtggtcccaaggatggaagaggtaggagggtgtccctaagaggaagagcagggcaggatttcccagaaacccagagtagatgtctacatacatctcctaggccacaactccctctcatggccacatcttataaggaagcctgggaatgtaatttgtacctgaagatattgtggccctgaacaacattgggattcattgtaagaacaaggggagaatgtgtattgactagacattaatgctatccaacgttctcccatactttgacatcacatttcttctatgggctcatggaaacaactgtttctcctacatataagttatatgtaggaggaaggtgctagaaaggtccctggtctttggctctgagtcaaagcgcttagcttttagctggtgcccttccattgcatatgaagcctgagggaagaatcccgtttgctgaaccttggcttcccccactgttcaacgagtggagtgggatgatctccagggttccatgcagctctagaagcccatggtgctgtatttctgaaagactttaactcagaaggtgggatgcaagggatgaggccactgaagtcctgaactgaccttgtgtcctgaggaggcttggtcagcaggacctgggcaggggccggctgaagagggggggcccagcctgtggttggtattgggggggtccccttctaggtgggagatttccttgtcttttggaagctaactgcacatggacatgaagtcccttctttacccatcgtgatgaggacgaatggagcaacttcaggccctctgtccccctcactcttacccggacagcagtctgtccactgtcagtggtgttgattggaatggatcagaggagaaagggggaaaaaactgaggcagaagcctgcttgccttcacagtgagcggcgagcaccagtctgcaggcgttacctgctgtcatttgctgatgtctgcattttggggactgagctatttgggagagggcccttatgttctcatgaaaacgatgaacaacctactgcaaacaaaggaaaagaacgtcatgatttctataaggactgcttttcacagtagttacgatgtggtcagggggcgtgctttagtgactagctctgaattaactctgatgagagtgttagaggtttcatagtctagtcacttagaagacacatgtcaactgtagactggaaaggggccgcgtgtgctaactttcgttcagaaaactatgtctgactaaagatcagtgatttctttttttaaactcacagcagtgaaactgcttggtctatttgtgattttactaaacagtcttgactaagtttatgatgtccgttcactgcttcctcagatgaacaccttcttcctatgcggtgcttaaaatgtagtttaagagtgaacattttatttaaactgataagaatcagcaaacaaatggagaagagttaggatttcaatgggccccgcctgttagtaatatacatctacagatcgttaacatggtttgcaaatatctactgcttagaaatgtcaaagaaagggccgggcatggtggcttgtgcctgtaatcccagcactttgggaggccaaggtgggtggatcacgaggtcaggagatcgagaccattctggctaacacggtgaaaccccatctctactaaaaatacaaaattagccaggcatggtggcaggcgcctgtagtcccagctacttgggaggctgaggcaggagaatcgcctgaacccaggaggcggaggttgcagtgagccgagattgcaccactgcactccagcctgcgtgacagagcgagactctgtctccaaaaaaaaaaaaaaaaaggaaatgtcaaagaaaataattctaatggttcctagttagttactgtgtttcattttttcctctgtttttcatgaagacttacaatgcttcagataaaatgcaggatagagaaaggtgagggggtatttttcaagacacatttaggatttaatatgtacagatgctcttgatataaaataaatttgttgatcacacataatttcagcctttcaaaacataaacatggcatacaggacccactataatgatggaaactggaacatgttttgaaatcaaataaaatgtcaaaattttattaatatgctttaatcaaaaagctaatcctattactttatttctaaaataagaaagaaaaaggggaaaaaaagaagaaaggtaaaattaatgtaaaccagtaacagttttagaaagctatttttgaggaaaatgtgaaggtccatttcaatgggatggtaaaggtttgtaaacattttgtgactcctcttttgtgaactggaacgcgtcacattcaggacgtcgctggatcttcaggacattctgtgtgtttttcacttggccgacatttgctgcagtcttgggaatgtcacccgcattcttcctcctatttatgagctagagcacatataactgacttgagaaaaatgatttaaaaggtctccaactaaatttagtttattttaaatcaccatgttgactcaggaaaggagcttcacatgaaccccccgctttttttcctcctgcccagcactaagtttataaaccagaaaacaaagatctgccttcacctcccttctcttttgtcatttacttttagaattccattaacaaacacctattgcctgcccactccgtgcccacccctgtcctgggtgccgaggatgcagcggggagccaaacagatgaatgtccccatcctcaggcaggagacagacagacaataagacaaatgagcaaaggcctgctgtggtggaaataaatgctaaggagagaaaaatgaggcagaggcagcaaatggagagtgttgggggttaggattttatagagtgacagtcatggaaagactgacactggagtgagggcctgtgggaggcgaagggggagccgggagctatctggggaagaacattccagacacatggaacagccagttgccttgccagttgccttctgagcttgaggagcagcagggaggtcagggcggccagatggagagaggggaggagtggagatgaggtcacagaaagaggggccacgtgatgaaggggtgctgccaggttccctaagggccgtgggtctgtgtgatgggaagcccagcattggcgggttgtgagcagcgggagtgatgtgatctgatggatgttttcgggagatcttgctggttgccttgtggacagtagtttcaaggtttgaagcagggaacatgggaagctaacataataatccagttgaggggtgacagtggcctggaccagggacgttgcagtggaggtggggaggtgggcggtgatgagggcatgcgtgttattctgcatagggtttggatgcgtggcacgaggagaagaagtgagccaagggtgaagcccttgtgttgggtctgagcccctggaagggattacctctgtgttccaccttctgccagtcctgctggtttgtggatagcagggattgcttccctccaaggcagttatggtgagagcacatgggaagtgatgagggctcttttaatctaaaacttcttttctcctctgtgtgaaacactttcttcctctttttcaatctcccctcaagcctattcttgttgtccttggccagtgcggtgaagcagttccttgcattgtgtgtaggacctcgccaaggacagagagagacacagcgtgggttggtgttgcattgcattagaggtggccaagatgcacagtccagcccatgtggtcacaggaaggaggggtattactccgtaggtttcctttctcacaccacagcacagaatgattgctcagatcaaacattcattgtctttaagcactggtacaattgcagttcaatctcccctgcttcagtctacactgagttttcattgagactttgaggaattcaagcccctcttgctaaacacacacacacacacacacacacgcgcgtgcgcgcacgtggactactagtatcaggtttactaatgaaagagctgaatgcagagaagtggatggatttgggcccagttgatctgtggaagagggagactgagtctgggctctttactttcttggatggtgaatgttgccgtttgcatagaagcccgcatggcagtgaactaacagtaaccttgaagatgtgtttcatccaccacccttgaacccattatggctcaagcttgggtattgcttttaggaatctagcattgtttcaggaaaacattttagttcttattgttttctgggaagccttactttgcacaagggcagtggaagaaaccgaagtgcatattaagtgccatccattacttgctgtgtgtttgaatagtgatcgcagcgttgctatgttaaattgcaaagaacctgtgaacctgaatctccctccatccttcccttgtggcctctcatctctcgccactctaaaggcaccagccaggtgctcagaggagcagaagccgtgttaaaaatggcttggagcatttaagtaacttttctcctttaattctatttatttgaaatatacaaaagtccagtcataataaaacgaaaaacgcctttgaccaaattcaacacacgctaatgcttggttgtattgtcttctgagtctttttgaagaaacacagcttacaaacagagtgcatgattcatttgatccttttcttgcccagtctcttcctcttccatttggtatccagaaatgggtgtgttttcttcctgttcacgtgactctgctttctctttgcctgtatacagcacagatttcacacatatgcatgtgcacctgcacacatgtgtattctataaatgtgtttataattttgcacatatggtgttattctatacatatccttttgcaagtggttttttcattcaaggttatgttgttgagattatccatatgaatacaagtagattgagttcacgtactgatttttgtggtggtttagttctttcataattttctttgattgcctcataattgtttttatttttttaagtttaagtctttttttttgagatacctttgtttttttccagtgtcgagttattgtggtgagggagcgtgttgtgtggatcttcattctttgaaatttgtggatactttctttgggatttactatgtcgtttttagaaatcttccacatgggcgtgaaaatagtatgtattttcagtttggttcaggttcccttaatgcctgctagatctagctggattgttgtgttttcagatctttgtataagtggtgcattcagcaaattttcttcccctttgccttcatccacgtttggacagatctctcttttacatcccttgttactgtctggagtagattcaagagctttccagtctcctttaatcacttaaaagtctgatctggtctaataaaatctcttacatggattgtaggttcttttaccatccccttgtccccaagaaagacactgacaatgggagatgatgggtatgttaatctgtttgactgtagtatcactgtgtagtaatcattgtgctgtgtctatgtatatccagatgagtatttcaaaacatcctgttgtatactttcaataaatatatgcaattttaaaacccatggaagatcttacgtgattctacccttcttcctccctaaaccgcctcccaagacatgggggatgggctgtgggaatctggagggtgaggtctgttccattgtttgtacccacccctttgctcccaccccactggttctggtgcccctgtatgtggggtgcatagagggtgaaagaaattgtctgacttttctttcagacaattcagaatgtggggtcccagacacctccaaaccctcagctttaggtcctggccactaaatgtcaggcaacaggtgaagtctcacaaagcatcctctgagaatcattgtactaattgcttgtctacttaatctagctgtttaggtgagagcgacaacctctctctataatgaaggattttctatttctgtttataattctgttgatttttgcatatgtattttgaggctgtgttgtttggtgcccacagcttctggagttttatatcttcttgatgaattattgctccttattaccaagctttgctcatctttatccctaataaataattttatcctaaagtctaacttgtcctgatagtaaagtggctattccagctttctttttgttgatagctgaacttcttttttggtatgttatatcaggtatatctttttcagtaaatgtatgttaaacttttctgtttatttatggtttagatacatctctcataaacagagtataactggatttttaaaaatcatccaggctgagaatatttatgttttgacaagtgagattaatttatatattgtgtaaattacaatatatacaaaatatatttgtagttgttactgtcaacttattttgtgactttcatttttcctgactttatcaaatttatttatgctgcctatcccaatctcctgttttgggaatgttatacactctaattttagtctggttagactcttcttacgattgtctaattatccctcacctaacaaagtctgacatcaagcattgtttctacccactttccaaacgatccaaggccctctgactctgctcccctacttccagctctcaggttactgttacctagttctttagttctgctttgttttagtaatgatttctaaagttaatcattactattatctctttaattgtatcaatgcttatcttgatttatcaactcataattttcttttaaaattgaatttaagatgcatatatatccactcataattgtctttgtttacctttgtattttttttttgagacggagtctggctctgtcgcccaggctggagtgcagtggtgcagcgcaatctgggctcactgcaagctcagcctcccgggttcatgccattctcctgcctcagcctctcaggagtagctgggactacaggtgcccgccaccatgcccggctaattttttgtatttttagtagagacggggtttcaccatgttggccaggatggtctcgatcttctgacctcatgatccgactgcctcaggaggcgctgggattacaggcgtgagccaccacgcccagcctgtttacctttgtattttgaatttcatttttttcctttctgggtttaattttcttcttattgaagatatactctaatagctctttaattaagtgtctgtaagtagtaaaatcttttggtctttccctcaacatttcttcaatttatactcactcttgaatgttagttttgcctgacgtagaattttaggttgccagttattttccagcagcactttgaaggcattattttattcccttctggcgtctgttgttgctgatgagaaatcttgtatccatcaggttgtttcctttgtagataatctttattctattctctggtcacttttaatactttgtctttgtctttgatgttttatcatgatatgactagatgtggatttaattatgtttattttgctcaggactccttttttaaaaaaaaatctgaagtctcatttctttctctaaaatctggttattatttatctccaaatatatcttctgaataatttttatccctcattttcactgttcacttggacatctcatgctagcctccacactccttaacatctctgtttttccttctttctaggtagttcagtaatttctcttaccatttttgaataactaattttaagatagtctattaaatttttatttctggaatttgtcttcagttatttcagctctgtctgttattgatttatactctgctgctttttattatggtttaaatttctgtttttaaaaagtcattttaaattaactttatagatgcttttgtttgatcttttatccatgctgtttggggtgctaatcctcaatctttttgtatctactacatctactaaaatctacttattttggtttttttcttcatgtactttacaaaattttcttgtgagcttatcttcagtgaggattgttctttctttgtgaattctctataatgtaagctatgaaagtgtctctataaagtagttttatttttgcttctgccagagccctaggggtgttgaatcagttggtcatgaatcagtttatctatctatctgtctatcatctttctatcaaccatctatctatacatctaatcatctatcagtcacctatctacctacctatcttctatcaattatctatctgcctatcttctgtgtatcatctatctacctatctactatctatcagtcatcagtctacttacctacctactttcctgtcttccatcaatcatttatctatctatctacctatctacctatcttctatcaatcatttatctacctagctatcatctctctctctatcatttatcaatcatttatcatttatcatctatcaatcatctgtctaatgacctacttatcaatcatctatgtatctagtacctacctacctatctacctacctacttctatcaatcatctacctatttacctacgtacctatctcctatctatctatctattatttatctattatctatctatcatttatctatctagctattatctatctatctttctatcatctatctatcatctatctgggctgcaacacaccatacaagtaacagaaatgtggtttttatttctcacagatgactgtttttgctgcacgtagccttaggcacacagctacttttgctaggaaaggttccagtctttgctctcctgcttctcttgggtcataagctgtgtcctttgtccctgcttgggccttggaaccccacccgcagtgcttaggacttgcacttgtgacccaaatccctatgggttcctgtggattcagctagcacttgctaactgaatttctttctttgactctggaccttggggctttctgttttctttctcttgttcttggccatgtgtgtaatgtatgtaaattctttcttgggggcagggtggatgttggtggtggttagattttctctagcatttcaacgtgcttgtaattggaataaggcctgattgtctcaggcgagtctaccatgtggtgatttcagactgttctttatgaagattatttattgtacttctagtgaagtccaggaacagcatgggcattcagtgagggaaaccattttttaaaaacagtgatttttgtgaccccgtgacaatggttactgtgccactccaagatcacatttttaatataattttgtattattggtgttgaaagcatttggggtagtatagatagctttttgatggtttaaaaagtggacagaagtggggaaggagagaacaaaaatagccggtattttggtaggaaaaactgaaaattcagcaagagagtaagtctacaactgtgtggaagctggaagagaggacagatggagaaaaatatttcatctaggaaacactgaagattgttttaaggggaacgagagcagaatcttcagttagaaagaagcaagcaagaaaagaaataatacgccctataataagtacactttctggttaacatttcacactcccaacaagagcaaatggcttgtagatcttgcagcagcatgagtgaggctaatagaaattgcatggagatttttaagttgcttctattcaagctgacattatcagagaacggtccttgagtaaggctgaggccattcttcaggacctaatgtggatatgccagttgagttcgtacttagacaggacacaatcagtaatactaacaatgtacacattatactggtaatagaagagctaacatttatttgactatttttggaaaggcatactgtaatatctgtagagataaatgtttatgctttggtaggtaatttaaaaagtctattataaatctgttataataacattcacatgaaatttcttttaattaaaaagtaatgctttaaggacattaaacaattatttaaaaactcaaaattgcctcaattataccacccttgtgtaactatcttcattttacatttgtgtattattttttcttattgtaatcatactgtacataatattttacattttctcctatttattccataatagatgttttcatgtatataataaaattctcataattttgtagacattttagaatggagatttgctattaagacataaaactagtacttttttttttttttttttgacggagtctcgctctgtcgcccaggctggagtgcagtggtgcgatctcggctcactgcaagctccgcctcccgggttcacgccattctcctgcctcagcctcccgaatagctgggaaccacaggcgcccgctaccatgcccagctaatttttttttttttatttttagtagagacggggtttcaccgtgttagccaggatggtctcgaactcctgacctcatgatccgcccgcctcggccccctgaagggctgggattacaggcgtgagccaccgcgcccggccaaaactagtacattttttaaaaggaggaaatcaagatgccaatacgtgaaggcattaacaaaggaggaaaacctctattctctaatttcatcagcatttcagcaaataaaggacactttaacctccacccccaaaaatctgaggacatagtttcaaaagaatgtgacttcagttatgttaatttcgcctaagagtactgttcttccgctttcctcctatttttctaaggatgattgaaaaccttatcgggggcccttcttgatccaagagcaaagttggggattccctgccttgggtgatatctcgagagacttacttaaggggaatgctgttggtgatttttcttgcaaaatagcagactcagtgagaaggctggcatttccaatgatgggccccagattcgccacttcttttcacaggtggaagtccttcatgcagccccagagcaaggaactgcaaagaatgactacagggtgcgcaccaccacgcctagctaatttttgtatttttagtagagacagggtttcaccatgttgaccaggatggtctcgatctcttgaccttgtgatctgcccacctcggcctcccaaaatgctgggattacaggcgtgagccaccgtgcctggccccaatctgtttgttttaatcggattttatctgaaagtcctaaaacatgttcaaatatggccactgctagagaccttgatgtctttgccattcacattttcattaacaaaggacttgctctggatgtaagctgcgtttcgggtctcttcatgtggcagaggtgtctttaggggtctaaagacaagttcttgaggagacccagctatgagctacaagtttagcaatttggaactggctccatttgatgtcattgagtattcatagtacctgggggctggacaggattttgaacattaccttgcctgtgctcctgcttgaaatctgtctgagctcaccctgcctttctggcagattttgttcttgcctggaccctggctaggttaactttctgagttgaggcatgaagctcaactttttcaatgtggtttgcccttcacttctcagaaggaaattcattcccactggaatcgtcgtttttttcttgaggactccaccagctcttggcgttctaggagtaaaaggctcatgtgtttccttcaggaaacttctagctgcttaaaggagcttaatgtgaagcatcaagccactgagacgtgttcaaagattttcttcaaaatggcttgagagggaaaaaaatcacaaagcccacaaatgaatgtattgttaagcatgacttctccagtgtggttgctctgtgctgctatttacaaaatggagcagtgttttttaatgatgagggaggattaattgctgtaaatgcaccagttgctgcatttcccttccttatcccctgccccgttaaagtccacatttatcaagtcatttgatgtttgaatatctggtgtttgtacaactgttttggtttacttatttatttatgtatttatttatttttgagacagagtcccgctctgtcacccaggctggagtgcagtggcacaatcttggctcactgcaacctctgcctcccaggttcaagggattcttctgtctcagcctccttagtagctgggactacaggcacccatcgccatgcccagctaatttttttgtatttttagtagagacggggtttcaccatgttagccaggatgatcttgatctgctgacctcgtgatccacctgccacagcctcccaaagtgctgggattacaggcgtgagccaccatgcctggctgtggtttctttattttaaaaattcctatgtttgcagtgaaagagccaaaagttaaaaactgagatgcattagagaagcaggagtttatgccacatgcaaagagcaggtaaaaagcactcaggaagacaacagaagtgactcagaagtgttctttatgaaatatgcttctttaaggattgcttgaatctgggaggtggaggttgcagtgagctgagatcacaccactgcactccagcctgggcaacagagggagacaccatctcaaaataaaaataaaaataaaaataaagtaaaatatgctcctttaaaaaagtgctggttaagctttgactacacctcatttaaaattttttaatgtcaataaatttattttaagttgcttctaggagaaaactgttactattttaaagttactatgtaggagaaaactgttatcctctctacttaaatcaagatagtgactggaaatgctggcacatggaaataggagggtgagtgcttggagtgtaacactcatgggtgcctgtcaaaggaatgagaaactcggggagtcaagtaatctaagaattcaaacagggaaaattctccttatacaggaacaatatttagttgtgattccaatcttcaccttgtatctcccctgtttctctggctagcctttggcagtgaaacctcaaaataaatatttattcatttatctctctatttttctatttctctgtatgattttttttttcttagtgagcatgtctatgacaataatatggtgttggattgcttcaaagttaactcaccacattgcctttgccaccaaagagatctgccttttctttaggttttgtaaaacgttgtaggtattttgggcccacagtgtacaactgagccttcagttgggattcagtggggattcctatcagtggtgttattcagacattaggtgggattcctgcctgatctggctgccgcgttgtggactctgtcatctgagttgttgggggaaggcgtcctactgaccgttccatcctgtcaatcctggaatccagtgatccccttgacatctgtcagtcccggcaataaaagctggtgaactctgtgtccactggtggaggtgataaccctgggtggtgtttcttccttgtaaacctgattgtaatgcccagagagaaaggaaatctaatagtggcagccatcaccattagactcttggagccagagatttccagggggggttagatgcatggataggttgcaatcccaggcttgcctttttcaaggagcgatagcagagttttgaaatcatctgaagtctcaagggatgtctctgtggctcttatagaagatgctctgaatgtgtgtttagtggttgtccaaaaaaaacataaagaatacaaacaaaaacctcttggcatctttaagccagaaatgtgccttaattgtttaattctacattcaactggttctgtgattccatgcttattacgatttcttacttttgcagctattggtcaaataaaacggagccccttgtccctgccctttatccatcttaagagcaaggaggtgtggtcagtgttatcaatgaggtccatgtgatgttggattctacagttctgccatgatgggagtcgccacatgggatggggtccctttactgtcccctctgggccccttcattgcactctggagggtctttctcctgtggagcaaacagggaccgggagacactaggctggagctgtcctgagtcttgtccttcaggggacgttttctgtcttacccatcccaccttgaaggaaaatgggaccccagctacagaaatctacgtagagctggacatttctcccagctactggcctgcaggcaaatacttcctgattctgaggttgtcaaaactgccttgatgcccagccattctcaaacctgggtgttttcacttaataccttcgccagccccagggtagccaaagccggggcggggttgggtggggattgcgggtaggtttggatctccttgtatctgtagactcttctgcctcttggtgtttgtctatctgatatgctcgctcttgtaaacttcctggccctgtcaccaacctcgtgccttatagatcacttcttttgcctcctcttgtttcctcagctctttcagagacccagtgggctgttgctcactcttggcctgattggttttgacactatcctatttccatgtggctttgctacaggtttacctggcagggccacccacccaacatatgagaaactgggcttctttgttttctgaatgagctgttctcagtaggttatgatgtaggtgcaactttacttcctccaaactcatgcctcaagtctgatagctccttcctgtccctgttccgagtctcctcaggcaccagactttccctgtcacttctagatacagtgaacagtctaatttccaagtattgagaggtccagggaagttgaatttttaaaagcctattgttcgtcctgtttcaagattctttgcatccggagctggtgttagcatcggaaacgcctctggggccatggccggctcccagcctcagaggcttgcacacccactcctctccttaccactgacctctgcctctggttctccagggttggagcaggaagacaggacaacaagggctattaatggggttacttggccatgcatcataatttggtgtcggattcccctctgtgaagcaaaggtctaaaagctgccccttgttcatggaatgcatgggagggtgcggaagggctcttgcagtgacattgccccacagctctccatggcagggtgacatccctgtgtgtgtctgctgatggtacccttcccctagcttcaccctggtacacctccagcctctttctgtcagggctggctcacccctgcaagtccagccacctgccatgggtccctgggtacaaggatatacccaggccctctcacctcaccatggatggaagctcagtgtgcccccccatggcctctccttcttacctgtccccaggcagcctctgcaaacttctctacctggaaggcagtcactagcccctgtgccctggtagctcagaaccctaggggaacccttggaggcagcctaaatggtttttttgaagcttccctcactggccttgaggttggtgcatctgcacatggatgtgaaatttccctgcctatgtccccctttcctttctttccctggggtggagagaggtgctgcacagcctctgaaactttctctgaaggaatgccaggtctctggtctcttctatcagtgccggtgcacaagagctaattgtgcagatgtctcccaactcctcctttggttgattgaaattgtgggaggatttatactgtgcagaaaccagaaaactctacacatccaccctgctcccctctgcgactgtgggagctgtatactcagcattgaccagtttctgacatatatacccttgaggccgggaaggcagaggggcagggacttgctgttgttatttaggtcactccttagagagttgtgcatggatgtgcgggcatccttttttagagagtgcaccgctgctgtgctctgtgtgctattctgagcctcagccgatggcaggaaatgtcccattttgcactcagttacttatgtggcatttgtgatacattagtgctgtgcctggtgtttctttcatgatattattccctgttttccaggttaggaaactaaaactctgagaaggtggacttgttcagggccaggtggatggtcactgctagcctctgtgcctgcactctgctgcctgcgcttccatgcctgtgaccctgtctgtggggttcactgagccagtctcatagtccggctgctgactccaggaatggggcatggggcccaggaatgcctcagcgattctgatgcaggtggcatcagatggttggaaatcacctctgcagcctgacagggactggagtcttggggttctgggagaaaatgggtggtttttagagggaagccctcctccttcctgtgctagagcaaggtcgggcttacagtccttgctatgtgtaaaggacgtggctggtccaagatcagggctttccttaactccatctagggagcccagtgactctggtttgctgagattgacctccacacaacctgagcacctaatgctgtcaatttctgctggattgttttgtgcttattaacgaactctcagttatttcccacataatcgactttaagtcaacggattgcaaatgttaattacatcacgtaatttctaaattatatgattttataatttctaaattatatgattttataattctgagttttattggcagttttggtaatttactctgtgcacattcaatttgcccagttggtgtgggctctgtgatgtgctgtctgggttcccttcaggaaggaaggacttattccctcagatgctgggagtatggttggaagatgcctcagctgtcagccctctttgggaagtgcctgctgatgatgacagccctgtccaagctcatgcctcgttcccaggacatcctacaaccaatgactcatcaatgcaggagtgtcagccagggtgctccagaaagatccaacaggatggatgtagatagatctttctccctctctctctttctctgtgtgcgtgtgtgtgtgtgtgtgtgtgtgtgtgtagatatatatagatatctctctatatttcaagttccttaaaataaatcttattacacccatctttatgtccatacataaatgtacacacacgtgtgtttatatgtatatagatatagagataaaatgagatatctatgtatggatgtatatgtatgtaaatatatatagacagataaaccaatttcttaaaaatacatctcattatattgatccatatttataactgtgtacatatgtgtatatacatatgtatgcatctagattcagatggatgatagatataatgagatgtattttaaggaattagtttacacaattgtagactggcaagtctgaaattgggaaggcaggccagcaatgatctttccttttctccagagtgggccacagcccggtgctgcaggaagaagaagatattaccattaaaaagaacagccaagctctcctggataaaaggaagccctgggaagttggtgtctgctcagattacctacacaagagtctcagtgctttttggggagactgccttttgttttcagaaaatgtaggtggatgtgactgagttgaaggtgggtggtgtgatgtctgagtcttcctggtgttggtccaccccatgccttaaacaccactgtggggaacctctcctgggaggtaaaccacttccagctcagcctgaaaccaaccatgttcttcagtcttctcaagaaggccatcttggctgggtgagattttcagaggttaattcagagactcgttgccaaaactttgcatttcagagatgtccaggaaactaaggaattctccagagaaactgggaggcattacaacagatattagcttgcatgtacctgtgtagttgaatttctgtcatcaggacagaaggattagttctgtcaagtaatcaagtgtcacacggtttggctcacaaaggttaatctttccactcttcctgggctttgactgtgaacaagtatcgctggatcacaaaagagagggccctgtggtggagatgactcacagaaagtgcctcctgtttgctttctctgctgttgaaccaggatgtgcctttctctacacttagcagacagtatggtcctcaggaatacacagaggctggttttgaattccgagtttgaatttgtgttcatttgcttaccctacctgtgatcttcacatgcctcagttttctgagaaatgagaacaggaataatcacctttcaagctctctcaataaatggacctagtgattaaaactatgaaaggctctgcctgcaccttgcactgctgaagaaagctgttaccacgacacagaagaagggcagtagccttgctgggttaactgggttcgtgatgagcttattttttacaaaatattaagatgttctagctattataaaaagagaccccccccccccaatcccacaccaatttttatatagagaggatctggtcctgggattgcaaaacctgttcagattccagaaggctaggccagcaaagaaaattctggtacttaattgtgcctttctcagcaaaagaaaaaaaatgctgaataaacctcataatgcacctcatgaatgctacaaattgaaaactcaatgacatttcaagcaagaaaagaaccccctagtgatatgttggttcaccaggcaggtgtgtgggaagccagatggccagcgaggttctgccctccaggaagggtttgccctccaggtgcggaccctctccccatgtcactgagaagctctttccatctctctccattcttcatcacagtctccatcttaaaggctacacactgcctctggaaagtcttgctgttctttaagggcagaacacttcagagccagcctccaccgctcccgccctgcttctgctctgaggtggccccagcaggagtaccagtcctagaccctgactgagcagagctcccgggcttccattgaccaacctcacaggccccggggttcaaggatgcacatgctcattcttggggctgaaacagaactccccatcttcactgagacccacatttcctggctttccatcctgctctcctctcttccctgcaccttctctgcttaattggccaccaggctctgacatgtcttctcatctccaccctgtctcttgcattccgaggcttccccaccttcattaccttgggctggatcgtggcagccatcctggaactggcctctctgcctctggccttccctccctgtagtctcctgcctcatgaatcttcccaacagcctctttgggaaactttgctcggcaggtgctccaaaatcttcagctattttcacaacaaggttcggacttcctagcctaaaagtctagactctccccacgtcttggccctttgagatccacacaaaccctcatcgtccaaccaatgtgcctgccatttccctcttgcctcgggctctcctgcttcttcatttttctggaacttctgcctgagagacttgtctgatttctctccagcctctctgttccaggccattgtgcaaaacccctcaactctttttttgcttggcaaatcccttctcagccatctcaggagatggccaagatggcaaaatcatttttacagtttcgacagggggcttctattaaatggtctcattgactcctcacgtaaagtagctgtgttggctccctgtacagagtcttctgcaagctgcatttgatttctgttttgcctaagttattattgttgtctggattgccttcctctctgacgtccatataagttcttcctatttttcatgatctgggttctgctattcaaggctgaaatgccctattttcctctccttcagatgattccagttcttcttactggagcagctatgtggccccttcatctgcatcacaaaacctgggtccacagccttcctctcctgcaaggcatgtgggctctttgggagtgagagacacaccttgcaacttttctgtcccatatggccccgtccacagctctgtgcatggggtgagtgctcagttcatacttgttaaaggatgctttgatgatggagtccatggaaaattctatatagatgcagtgcatacctatgaggcttcatgggttaacggggaggcatgttgtcaacctcaggtcctgagtgtcggggaagcatgtttgtggcggggttcatgatttctattttaaatatgaaggatgatttttaaatttttatttcccaattgtgtccagtacaaatgaggtgatctttgtgcaatccttgtaaaccagtcaaaactcagtggaaatggaaaagctggtttcattgctcctggtggctcagtacccatcactgaaatcccaaagtgtttttggcaaagccgatgggtatagaactattttcatgatgagttcaaggttctttgaaattccccacccttaaagagcacaaggaaaccttttcctgttggtattctctaattttttttttgtcaacaatgtgatatacgaattgggaatctgaaatattttttcttcttttttctttatgcttttaatgctgcttgatttttcttaggaaaggttctcacctctatctgcctctctatactatatctgcctcctacaagtatcaaagtgatgctgaaagaataaattttatctaaaaaatgataacttgtaataaagtctcttatatgtaatctctctttaatatgacttgccatttttgttctattatagattattttgtacttgggagttttgctttatctaaaatattgagatgctaatatgatattagctaattgccaattgggtattttatatataacctcagaagtaattatgtattttttttctgtccagtattgttcatttgcaaatataaaacagatctcattgcaaagatggttgtctatgcatttgcttctttaagatttgaccttgtaattatatcgagacaaaattcattttgaaggtcaaatttgcctctaaaacagacttcaagattgtgttctcaaagatatattgtgtttgatgaactttcttagaaatacataatgcttgtttaatctgtggcttgcttttcagttgtctgctcttgtaaaatgactaaatatttgtttttccagttgagcttaaggaaaaaatccctggtaaatgtgttttcttgaacagaaggctcagtgtaaagcaggagagaagtcatatttatagttgcttttactttcttgatgtcatccgcctttcaaatgctgtctgttttccttcagatctctcgtttttacaggggggccccaggcagaccctggttcccacactgagggacatggcgctgttttgctgctgtgtgttttgttctggtggaagctggcagccacctcaactctgagatcagctcaaatgctttacatgcaaaacggcaaggctgagaaagaactgaaagtttccttgggtccaagaacgtcttgggctttacaaactggtgcccacaggcacattaatacctgtgtttatttttctatctcctgacacacacataaaaaatgggaagacgcactggggagaaaggttgattgaatgtcatgaatgaaagaaaggttgaccctccaaagcaacatgaaatgaaaccaaaccacaataacaaccaaatgaaataagactgacaagaagtatgcggtcatggccaatacatggctcagacatgattcatggagacccttgaaattttcttccagcaaaactgcactttaaaggtttaaatgttcaacatttctctgtgacttagagtaaaaggggaccctttagggaattgtataagagtctaaggattgccttactgagttctaaagtatagcagagttagtggtgcagcagtttacataggaaaagcacacacacacacacacacacacacacacacacacagtgaagggagatgacaataagcagcccacattttgggctattaaccaggtttagaaagcaaaattgctcaagtgggagtaactgaagagcactcaagcctgccacttttccagatttggaactccgcctccctggtttctcctctcatcacagggtctcagcgcctaggagagcagctggctatgctggcttcacagctttcctctgaacactcttttcttatcaacagttccaggcttcttggtctctctttggcttctggagcccatgtgtgctagagctggctcctcccaactcgctagagccggcaatgatgcgttagagcacatcttttcccaactctgcattcagggactcccctgggttccttgcagttgcccatgatggaaatattgactccatagaaatgaccaagtgcttcaaatcaggagttttcctgtgagagcctgttgttagccatctggcagcacaccccttctgagacagtggggtcccaccttcctgccagaactgaccccaccattgtgctgtgaaacatggcatttcctctacctcttccccagacagtaacgtccttaagtgccctggctctagaatctctatctcctctactccactggctccctttatcctgtctataaacatacctgcttttctcatccttcaaacagactgagcaaataagataaaccttcttttcattggtttgtaaatgccttgagggcagggctgagtcttgtgcactagtgcatccctagctactagtaatttctgaagtacagtaagtgcccagcaaatgttgggtgggtgaagccagttagtgcttttcatttttgttttcattgtttttttggttttgtttgtttgttggttggtttgttttgaggagtctcactctgtcccccaggctggagtgcagtggtgcaatctcagcttgctgcaacctctgcctcctggattcaagtgattctcttgcctcagccttctgagtagctgggattgcaggtgtccaccaccatgcccggctaatttttgtatttttagtagagataaggtttcaccatgttggccaggctggtcttgaactcctgacttaaagtgctgggattacatgcatgagccactgcaccctgtggcattagtgcttttctttgaactgccactccctccctaactttgttgctcaacttcttctatgagtagcctacattgccctttgcatatcctccctgtttttaactactgagccatttggcttaatgctgtcaggctcctacaacatttttagaggacagcaagaggttttaagttgccaaatccaggacctgttctcaatgcgtatggttggttgaatgactttctcctggacatgaatctctctgcagttgcgacactgaactttccatcttactgaatgtccttccttggcttccatgacttagatctttcctagtttcctccttatgctctgactgctcctccttgtgttcttggctgttttccttttccttctcagtctgaaaatatttcagacactgccttcaatcctcttctgcctccctaactcccacttagactcttttgcccctttcacccctggactttccaataaagaaaaaagaggaaggattgcagaatttctgtttttaaaaagctctccagctgattgtcatgctcaaccaagctacactctggcattaaggatcaagcaaggcaatgggggagttggcatttgtgatttttttctttacaactctgtctctctcactaggctctgaactcattggcaaagcccaaccctagttagtgtttagctcagtgcttggcacatggagggaactcagtgcgtatggatggatggatagatggatggatgaatacatggatggatgggtggatggatggatgaatacatggatgatggatggatgaatacatggatggatagatgaatgaatacatgaatacatggatggatggatggatggatggatggatggatgaacaattgtatgaatgaatggatttgaagggcaggttgaatttagatcatggaagaagacaacattatcagtgaaatcatcccttaattatagagacaaatcattcaacatttctgagttcatactctgtgccttgtgggacatacaggtgaaagactctttccctgcagcgtgcttccttggagaacacttcccttctttcctctcctcatctatttcctccacctttcctgctctcctccccattcccacttactgaaatgctaagtgcccatcaactgctctgttgctgcatctttggtacctctcttgtgaccctcaccacattatgcctccactcagtaatttaatttaaagtataacctctcatcatagcctttgtttattgaggggaggttccatgccacctccagtacctggacactcaacatgtggatagactgagataggccacttatcatggtaatagttatttactaattcttagatacggtgttgtaagtatggagatctatgagctgagctaatttccagcagatcattttattttaaaattagaactgaagagcatactcagcgtgtctgcgtgactatggatacagatggtaaaagagctgaaagcgacttttttgaacatggctactagagtgtatgggatacttttgctgccagtaataacaataacaacaaaaatgaccccaattcaaaatggtttagttaacaaggaaaatgcatttgatgtgcctagctgccctgccatgagatgccttcagagttggtttatactcttccctaccataggtagaaacacaaggacttccctcctttcccccagatatccacagcacattggttttatcctcaggtgacctcttctcatggtcctgggatggctctcacagttccaagtgccacacagacaggactactactctatggcctttcttcatcagccaacacttttcctagaagtcctctagctcgcttccccgagtgttagactgaccagaattatatcatgtgcccttccctaaaccaatccgtggtgagaagagatggtgcccagtgataggatttacactggtgttggggctggtcatcctccgtgggtcatgtgggggcaggcagaacacccaagcaaaattatgtttccttccataagggaggaagggcagccagttacgtctgctgccattgccacctgtgtgtggctatacatggaaaaagcaggctgctctgtggctgtgttcaccataactgtggggatggacggctgctgctgctctgtccttggcattgctggtgggagtggagccttctccccaggctgctgtcacgcacgtggggtccaggctacttcttggagtgagggtagcttttctggagttttctttcttcacagtagccagttccacctatggaatattcactgctgcttacacgtggtggccagggagatctgtgcgtagagaatggttctcttgtctagtgttttggggaacaaggtggtcattcattcctgaatttaacaatgcctttgctgggcatggtagctcacccctctaatccaagcactttgggaggctgagagaggaggattgcttgaggccaggagttcgagattggcctggacaaaatagtgagatctcatgtctccaaaattttttttttaaaaattagccaggcatggtggtgcatgactctttttcctatagtctgagctagttgggtggctgaggtgggaggatcacttgagccagggagggtccaggctgcagtgagctattgacaccactgcacaccagcctggatgacagagagaatcctgtatcaaaacaaagacaaaaacagaaagcagtgctttgcatctgtccatctggaccatcagcaaccccttctcattgaacttgcaccacctctctggagtcagagcctcttactcacagttttcagatgagcaaactgaggctgagggaggttttgttggctgctagtgggtcagcataaacttggggccccaagctcaaggttctttctgcctcaccatggctgctttgacaccttaagcttacccttcaggtactcagatgtgttcagctttggccatttccagtccagatttcctgatgatctggtgccttcttctacctccccatacagaacacagaacctgactgaatactgaatcccaggggtcatgtggtttgtcccactggccaggggcagggcttggagggtggtggtggtggtggggggtgtctcttcaggtcatgtgactccttgaccttggctttctgccgttgctggaccaggggtgattgagctggggtgagcagtttgcactcttaccaatgttctcaaacgactgtatttttgagttcttgagtctggtttacataattttctgacttttttgctttgatgaggccagctcacgcggctggtagtgtgcctttctctggcaaagcttctcttcgtggacttcgtgacatctttttggatcctttgtggcttctcagctgtgttacacataatttacgttgtcaggtaaatgctctcaggataaatgaaatattaataacgccataatgctaatttaaaaatacccattgcacatatttaagagaatcctctctgggcttgactctgggctttaaatcaggcccaacaatgtctcaaccataaatcaaattatcctttcagcctagtagaggttttggcataaaaacctactatagaatagcatagtataggaaatcttagttcacgcttttaaaacttttattccctttgcagaaattggaaaccaaatactcctttaaccacttatccatgcaaaacagttaaccaagcaatagtcaatattggcttttggatttggggaacatgtttattaactcaagatttgcacagctttggccgggcgccgtggctcacgcctgtaatcccagcactttggccgaggcgggtggatcacgaggtcaggagattgagaccgtcctggctaacacgatgaaaccccgtctctactaaaatacaaaaattagccgggtgtggtggcgggcgcctgtaatcccagctactcgggaggctgaggcaggagaatggtgtgaacctgggaggcggaggttgcagtgagccaagatcgtgccactgcactccagcctgggcgacagagcgagactccgtctcaaaaaaaaaaaaaaaagatttgcacagctttgcaaagcatgatctactgcaccgtccccctcccccatccccttgaacatcaggctgccgagcagggaaggccagctccttgggcccatgtatgactggatgggaaaagaatacattacagtgaaataaatgctttaaaagcatgtttaggattataaaatgattattccttagttttctcccctgattataaagatgaatatttttggtttagaaaatttggaaaatacacaaaactataaagaaggaaataggagttcaacttttcagatgctatgtataagtgagaggatgcagtatgtgtctttctgtgcctggcttatttcatttagcataaagttctccaggtttgttcatgttgtcacaaatgacaggatttctcttctaaatgctgaatagtgttccattgtgtatgtgcaccacttttctttatgggcgtttatgttgatggacacttaggttgatgccataccttgtctgttgtgaataatgctgtaatgaatttgggagggctggtacctctttgacataccgatttcattttccattttctttggatctatctccagagtgggattgccagcaatcatgtagtattttgatttgtaatacataccaaattgagttgtagtacatttgtaaaacatatagtattttgttttgtaattgatctttgtgtttttgaggaacctccatcctgttttccataatgactgtactgatctacgttcccaccaacggtgggcaagagttccctttttccacatccccaccaacacttgtctttttgataatggccattctaacaggtgtgagatgacactcatcatgatttcgatttgcatttccttgatgattagtgatgttgagcgtaggggaactggggagatgttggtcaaaggacacaaaatttcagttagacaggaggagtaatttcaagagatctgtgacttgaacttgaatagacctatgatctattgactgtagttaataacaatgcattatattcttgaaaatcactaagagtagatttcaagtgttcgcaccacaaaaaaataagtatgtgaggtaatgcagatgttaattagcttactttagccattccaacatgtatatatatatatatatatatatatatatatatatatatatatatatatatatatatatttcaaaacataatgttgtacacggtaaatatatattacttttattagttggtttaaaaaataaataattttaaaaatattttaaaaagaggaaaataagaactcctatttcacactggaaagccaaagaccatgactgttaaccattttgataacttttctcaggtcatcctctttcctttcctgccttccctcttttatttcatccacttatttttttttctttgtgcaatattgggatgatattatgtacgtggtttagtaccctgatttttttcccccagtaatgtgttttattttctgtatcacaacaaatgcttttctgtgacatctgggcaatttgcctctatgcataggtttcgaagacttcaggtggagttggctgggggcttcctaagtagagtgggaatgtcaactggcctgtggaaccatttagaaataattctgcccattacaaatattgatttgatgcagtgcttaagatgttttctaatttaaaaatattttcaacggaaacagatgccatttacaatttctcatgttgtaaggattctactaaatatattatttggggattgaatattttacttggaaagttgtgtaagaaattcctgtatctaaaaaaaaaaaaaaaaaaaaaaaaaagaagagagagagggactggattttggagccgtgctacaggcatattgtaagaaagatttttttctttctatctttttagctagttagtgttctaagattttaaaaaatacagatcctcctagcatttacaaagtaaaagggttgtttcttttctgggactatgacaattgcttaattacagttctcgggatgttttctaaattctaaatcccactaccctgttctgagcagcagaaagtgctaacagaatgatctagggaagccattattaccaaagctgggggctataaggaaaagaaaacattttcaaaatattttctgtgcaaaagcatctgtgtgcttcagcatgccagttaggcttggccttgctttcactcccgatttttgcttcataatgctgggcttccctcagaggagaggaatgttgtcccctctttttttaaggggaaggatttaagttctttccccttttaggatattttaaaataatgtttaagaaataggttttgtcggtacatgtacagttgatccctggtattaatatttgaaaacaaaataaggtttaatattcttcaacttatattcaggttattccaggatctttggagacccgaggaaagccgtgttgaccaaaagcaagacaaatgactcacagagaaaaaagatggcagaaccaagggcaactaaaggtaaaatgaacagaacccaaataatcttatgctgcctagtcaggaccccttttaaaaaatgtggatatgtaaatattttgtatctttcctatttgattttcatggttccaaacctccacagaccatttctggattctttgctgtacttggatgaattatgttggttctacatgacacccttgacttccctgagataagatgccccattgcccagcactgcctgttcctggccctacagtgtggagattttagaattactgccttctcagttctatagtcttcacagcccctcttttctccatcactgtctactctcttctcccttttccagaggaaccagaagctaggtgtctacagactggtgcttttacgatatttccatttttctatcatactactacatttggcttacagtcattttgtggttatttcacctgaatgcaattgaaaccttctttcaaggggcacacccaggcagtgaatctttgtattcacaaaacatgccaaaaaataaaaataaaatccagttgaagaaggagagggtcagctccctctctctaaggcatgcccatgaggccagctggaatgctagggctcccctggagaagcaccgcagggatcaaggttatgggggtgctcacatgacactcatgcaggccgcagaatgtatgagtccctcccttgccagaatgaagccagggtcgatcagtggaaggaatagtagtccatggagcctgagacatgccttgaccagggtcagagttcagtgagaaatggtacaattaaaatggatgtggctcttgaggccatgccctgactgtgaggcctctaatctgcattagttaagtgactttcgtaagtccctccatagaggtgatttcctttcccagtgctgttgtaacaaactgccatgaactgggtagcttaaaacaacagaaattcatcatctcaccgttccggaggctggatgtccaagatcaaggtgtcagcccaagtggttccctctgagggctttgaggaaaatctgttccaggcctcttttgtcttttccctgtgtcttcacaccatcgtccttctatacaggtctgtctttaaatcttgtccctttttttgtaagtggatcagtcacattgggttaggtcactaatgacctcactttaatttgattgcctctgtaaaggccctacctctctatcatcacatcccgagggaccgggggttagtactccagtgcatgaactgggggagagaattgatacaattcaacccatagctataagtatttttattcatttggaaagatgagccatttcctactgaagaagtccattttcttatttttagataaatgtgggagatgcattcagtttctcatgctgtcttctgtctcccgctggtattccctgcttagctttggagtgcaggagccagggctggactgggttaaggtgactggggcacaggatttcgggcggtgctcccctttaggtactgatcctgcacttgcatgagcctgagagggagagcctccttaaatcatgggccctatgtttctccctgcctccttcttcctgccccataagggaggcctctgccccagtcaggggcctggtgtgcttggcaggaatcaggcctgtgcagttcttatggcagggtttgctggtgaaagactgatttgcctaatatctgctcatccaggacaagtgcacccagcgaccaatgctttcaaggaatggattcattcctatgaatactaaattgcttagagccattttgcctacaatgttttcacttaatgactagttatcttaaaactaaaaaatacatttctaaattaaggatgtttttagtcagttgacaaagggctcttatgaaaattagcaatttatttattgaggattatttttcctaaaaagttgcaacattttaattagccagccatggtagcacgtgcctgtaatcccagctgctcgggaggctgaggcaggagaatcagtggaacccgggaggtggaggttgcagtgagccaagattgcgccactgcgctccagcctgggcgacagagcaagactccgtctcaaaaaaaaaaaagttgcaacattttatacagtatcaaaatcgtccatttgaaatatttttactttcttaattataatgattaccacttgtttagtgttgattatgtgcctagccttgagagagttttctttctgaggcataatttagtttaatcctcacaaaagcctgatggtgtagacagaggagataatcaaacaatggttcaacttgcatactgaccagttagaatagatacaggccaactcttgcactgacacctttgtgaattgctgaacatcgtttggaggttttacaaattttttattcatgtttcccaacaccaaatacatcatgtcttcgccagtaccaaccagtcattcaacactgataccaactgggtgtccaacagttcaattcagttctgacactgactaccggaagttagcacatgggtttaagggctgagctccccaacaccgtcctcacttcagatgccagttacaagtattgggtccccaggttacctacactctgtctgacatggctacaacattgggggttcccacaaccccccttttaggtgcaacaacttgctagaactcaggaaaacgctatgctcttatgattacagtttattattaagcatatgaatgaacaaccagatgaagaggtgcacagggcaaggtctggaaggattccaagtacaggagcctctgcccttttttttttttttttttttttgtgagatggagtctcgctctgttgcccaggctggagtgcagtggcacgatctcggctcactgcaacctcctcctcccgggttcacgccattctcctgcctcagcctcctgagcagctgggactacaggcgtccaccaccacgcccggctaatcttttgtattttcagtagagatggggtttcaccgtgttaaccaggatggtctcgatctcctgacctcgtgatccaccctcctcggcctcccaaggtgctgggattacaggcgtgagccaccgcgcctggccgcctctgtccctttagcattgggttgcaccacactcttcataccaatatgctcaccagcccagaagctgtcctaaccccgtcagggtattttatggagattttgttacataggcaggattgattaaatcactggccactggggatcaactcaatttctagctcctctcctctcctgagaggttgggaaatggggctgaaggttctgagcatctaatcaagactcactctttcttgcaattagcccccatcctgaagctatctagggactcaccaacctgctgccttcttagaacaaaagatgctcccatcacttgggaaattcccagagttttaggagctccatgccagaaacgagagacaagggcaaatggagttcttattatactacagtaatattatcctcattgtgcaaatgtgtaactaaggctcttggaggataaagtgatcatttataggtttccaaggagtaagtggcagatctgatttccatccctcatctggctctgcactgtgctcatatcgagcactgcccccagcccagcgtcctgcctatgccttctaggccccattcctgccctccccagctgaacccatccccattccaggacatgccccaggtgctggggcacccagagtgcctttccaaacttgactgagcatcttttgggctgcaccagcctgtttcctggagttcatcttcttgggaagatcttgtgtgtgtttccctgggtctgaaagatgagcagggagcattgctgaatggagtgtggccatgtggatcgggatgtccacgtgactatatgcatcccctaacccgcagaacacaattgggtttgagaagagaggaggggtagggtcgaggggtctcaaacttccatctattttcttgcaccagccctgcaaatatttaggccttctcttaaccattttgcaatactgcctccataattacaaaatgcttattttcccttctaccttgggtaccagtccatcttttttatgtggttagagcttacgtaattcaaatcaagtttgtttctatttagtaagacattggcattttgaaaacaaaaacaaagaagtgacacaagtagaattctgttattgttaaggccttttttgtttctttaagatacccaataataaaatatagctgggtcatgaaacacaaaatcatatggaagtatataccttagcaaatgagtttattgcaagaaacaagtattaaagaaatgattttcaatcaacatagagtgaagttctgcaagggttcaaaggcaggtaaaatagaaaataaaaaggttcctacagtgacatgaaactatcaccaactactaaaaatttttagtatggttttagtttgtttggttaccaactactacatatttgagaaatgaccattaggaacacaaaagtaaattagaagtactctttaaaaaatccataaaatacctctgaaatggtaaaaaagaacaggcactcaaatggctgcaaaaagagtcagagagggccaggtgtggtggctcacgcctgtaatcccagcactttgggaggccaacgtgggtggatcacgaggtcaggagatcgagaccatctggccgacacggtgaaaccccgtctctactaaaaatacaaaaaattagccgggcgtggtggctcacgcctgtaatcccagtgctttgggaggccgaggcgggtggatcaagaggtcaggagatcgataccatcctggctaacacggtgaaatcccgtctctactaaaaatacaaaaaattagccaggcgtggtggtgggcggctgtagtcccagctacttgggaggctgaggcaggagaatggtgtgaacccgggaggcagaggttgcagtgagccgagatcgtaccactgcactccagcctgggcaacagagagagactccgtctcaaaaaaaaaaaaagagtcagagatccgtgtgggttgaggaggcaggggagggtggttgagcttttattctcctggtctttaggtccgttgggttttcgctgagctggtgtggagggtggcagtgccatcacgctgcgtgctgagtgaatccctttggtgtgtgatcactctggtggtggcggtgtgagaagctcatacgcccttggtctctaatgtggcagagctgggagaaacttaggttccctgcttcatgcctttcaccctctttcctccagtcctcatgcttcttgttcatcaaggctccttggtggcaccctcttgtctctgcatgaatcagctctctctttcctctaggtatatccacacgcctcactgggcacctccactaactgcctgctctcaggactgaccgcttcatatctgtatgaaacagatctgtttcccatctcgatccctcaaggatcaggactgtgttgcatctggaatctctatctattcccttccctgtcattttatacttgatgcaacctgagtactcaaaacttccccataagaaacaagagactcaaacagttgctcatttagtttatgtcttggttggttacagaccgagtggctgctgtaacttctatgatgttgctgcggtcttggatatccaaggatgttttgatttttggaatccaggggaggctggcagggcatcatgtgaagtgagaattcagttgctcctgggaagggctctgggaatcccatggaggcttctggtggaggtttcttggttatccttcagtttccaaacccattttgagggcaggattagggtttgagatcatgtctcgtaggtgagtggaaatattatgtctctgtgttgggatgaagtggcttcctttgaaatgccctgtttgagtctccttttatcactggctagaaaaattttaacgaagatctcggtaatctgattgtacattgcaaagtgtatgtcagtaatctattgtcacaaaaatgctgtgtaacaaattccccaaatttcagtggcttcaagcagtaagcacttattcagccatgagcctgtgggttggccattctggttggacttggctagcggctggtctggttgcctccctcccatgtctggggttttggttgtctatgggatgatcaaacgtagtcttggtggggtgattggggtgggtgactctgcctcaggtacctctcatcctcccgcatgcatctggccatgttcccatgctggtggaaagttacagaaaagcaaaggggaacatgtcctgcctcctgaggcttcagctaggatctgtcatacttgtctttctgctactgcctgttggctgaagcagatcatataggccgcccaaaaataagggttgggaagtaattctacctctttaatgggaagaatcacaaagttatgtggcaaaaagcatgggtacaggaggagttgagtgttggaaccatctttgtacttatccatagtgacagtgaaacaagctatttaccctctatcttctccgtgcctctagagcacttacagggtgtttcaatgacctgtgtgtgtaataaactaccccaaatcctagcagcttagtacaacaacccatttattattggtcatgattctgtgggctgactggactcagctggaagctgcctccctgatgtcggcaggggccgtggtcatctgagagtcagttctctggactgtccaggacaactccctcccgggcctggcgttggtgctggctgccccactgggcactcggtcctctgccatgtgctgtgctgctgagggtatggggacttggtttcaggaggcaggaaggggaagctcccacttccataaaggcctgagcctgggactcctgaaaccttccctctgctgtgttctgcaggtcagaggcagccacaggtcagcctgggtttgaggggagggggacgagcttcagtccctggtgtgagcgtcagcatgtgtgtgcaggcagggaggaactgtgcggagtgaactagtccagagagaatgtccagacatacggaaatagccatgtgctccccagagcagggttgtgcagtgggacgccctccctttgtgaggatggcttgcagacgctccccttccgggctgaatgaccccaggagcagagtggtgttttcctgtggcacctgctgctcttaggataaggggagttgaggattcctatgctcccagaaaccttcagccaggccccatcctctcccagcctcttctcccacgagagcaccaggagcctggtcaccttcatctgcttcccggttcaatttcaggactgcacttcactccctctgtactttcagtaactctcatcccccagagggactttaggcctgggggtgggggtggggggaagtacatattttccaagacctagaaatttggttatagaaaaaaaatgcctaaggttcccagcatgtcatcttcttggtgagccaagctccgccaatcttgggaggcctccagggagactgaagacagatgtggagcatgcagatctggaggtagatgctcttcatgagaggcaattgggttggaatgggtgtgcctgtaccgtgagaggtcagaaaggacagatgtgaatgtggggaggactcctgtgaatgctttcacttgtcactacagtaatgcgctcagtagcaaatttgaaagacagccttcgaaaatgtctcaagttctgtaatcatattgtttatttttattttgcatttgttactgcaaagagccattgtaaaggagaaaacaaacaaaaaactacaggtgataaaaagcaagtgatggcttctaaaaatgtaaactaaaaaaggcatttttagtgccaaaaaagaactgatggcttggctgagatctgcagagcaccagagactggctggggaccaggtactggaggctggagcctggaaggaggggccccatgacgggagaggtccccctagaatccagctgcagtcagaaccataaccaagcgcccagggaggttgggcggcaggtgtcggtggtgggaaggtgaggggaagagatacccctctcctctcacccctgctctccagagggggccacgtcaaccaaccctgacaggtggccaggaggcaaggcaccctgctgagcccatctgtagaggtcagccctggggcctgtgacagcaaagggaggttggagactggctcggtggaaggggagggcacagacagtggtcagaacatgctgctttataatttgaataaaggaatatattggatgaagtatttatttctggaaaattcctggattataggcatctttaaatttaatttatttaagcggtgttttaaaatgtcccttcaaaatgtgggttgatacctgctaattaagtcaaaccaaattttttttgggctctggagtcagatagcctaatctgatttgaagtttggttctgtcgcttattaaccaggtgatcctggacaaatcagtaacctttatgagtcttgacgtccacagctggacaatgggaatgacagctctcagagtcgtggttggaatgaaatgagaaaatgtgtgtggagcccttagcgctcaaggaactggcgctgaagtactcaatgaatggtagctgtgctgtttactaagaacttaataacaaagctgaaaaggatgtgcagatcgcatgagttttggtgggatttcaaagtcctgttttctcagtatgatagagaagtatgccctgttttagtcccacgtcttcctttaatggatccctcattagatgctgcccacgtggaaggatgtgtggatgctgcatgtgatgtgggttagcttgagctagattcttctgtcctgtcggactagggttctcttgggctcattgtaagtgattttcccaatggaagggaagtgagttatctagtcacctcatggaccacacgtacctagaggatgcctttaggcaaacatgtttaatgtaaagctatgattcttttgccattggtgaattgtgtcctgtcctgctagaacataaaacacagaaatgcagttgtttattattatgtatgttgttccttttgtcttctagccgtcaggttctgaacagctggtagatgggctggcttactgaaggacatgattcagactgtcccggacccagcagctcatatcaaggtaagtcccgtcttggctgggaagccagctctgccttcctctgtgcctaggttttcatggatagcagcccacatatcagttaattaggggtcagtcaacacagcccaggagctaagaaaatggtttttacttttttaaatggttgaaaaatcaaaagaagcatatttcgtaacacatgtaaattgcatgaaatttacatttcagtgtccataaagaaagctttattggaacacagccccatgcattcatttctatatcatctgtggctgccttcactccataatggcacagttgagtaggttcgacaaagaccatatggcctgccagctgaaaatatttactgtctggaccttttcagaaaaaattttgctgagttaatatatgaaatcacatccaaattcttctaactcctgttataattccatctcctttatacttgcctggggttagcgagcaggagacaagtaggtgaatgattggatttccgatgttggaacgttgttttatctgggctcgccgacactcagcgctccatcacctcacacctgccctggctgctttctgacctgcacttcctgaggctctggaggtgagagggtgaggaagtgcgacttgtgccaagggaggtccctgagaggactctggccatttattttgacactacacatacatgtgggtaatagctacagggaggaaatgagatggtagttttcatatatttgacaaaaataaagactgcagaaaaaattggggcttaagctaccttatccaaacaggctgtctacacctgtgctggttagttcaactatatctatgctggccaaagtaattgactgcatggccagttcttcactttccccatactaattcattttccctaagtggtgtggttggttttactaatgtatattccttgcctaaaacattaattgaaaatgggaagggcttataattgaaagcaaagtttgtgatattgaaaagtgtacctttttgaataaaatataaaaagcctttcaaaatcccacacatacaattacacatggacgtacacacattttaaaacaatacatttggtgaggcattctggaccatgtgcagctcacatacacacacatttactttttttgaaaatggaattggaagtaataagagtttcaatgcattccttgagctttgtgggtgctccttcactttcagagattgtggtaactctagggatgtcgaggattctaaattttgcccaaggccatagaggagcagatgcttatggggacactataatttgatttctgtgtgatgttttgttgggctatgatggttgtgtttatcaaaaaaagtgcaagtaggaaatctcttgtggatgtgataaggtttcttcggaagtgctgggaacatatttgatcagtgtgtctgtgctacacaagtaaagtgggagaaagactttctttaatttttagtgtctgctgaccatgaagctgcatgatgcaaagaaaagctcatagggaagttgagacaataaatatcttctatagttcagattgtgagggacggcaactgaaattcattttattagcattccacaccacccctccaggcaaccagaaggaaatgatgaagtcagcaagaaagtattacaggttttaaaaagctaattcataaaggtgaaacaatcccatacaaacctgaaaacaccatctttgaaaatgtgtgttggtagaaacgttctatatttgatttcaggaatgaactatgttttcggctctgatttatcttattatctgaaggggtgaccttcccctccacaactgtgggtatttctagtcaggtgggacgagagactgagaaaagaaataagacacagagacaaagtatagagaaacaacagtgggctcaggggaccggcgctcagcataccaaggacctgcaccggcaccggcctctgagttccctcagttttaattgattattattttcattattttagcaaaaaggaatgtagtaggagagcagggtgataataaggagaaggtcagcaaaaaacatgtgagcaaaagaatctatgtcataattaagttcaagggaaggtactatgcctggatgtgcacataggccagatgtatgtttctctccacccaaacatctcagcggagtaaagaataacaaagcagcattgctgtaaacatgtctcaccttccaccatagggcggtttttctctcatctcagaattgaacaaatgtacaattgggttttatactgagacattcagttcccaggggcagacaggagacagtggccttcctctatctcaactgcaagaggctttcctcttttactaatccacctcagcacagaccctttacgggtgtcgggctgggggacagtcaggtctttctcatcccacgaggccatatttcagactatcacatgggagaaaccttggacaataccccgctttcaagggcagaggtccctgcggctttccgcagtgcattgtgcccctggtttattgaggctagagaatggcgatgacttttaccaagtatactgcttgtaaacatgttaacaaggcacgtcctgcacagccctagatcccttacacattgattttatacaacacatgtttttgtgagctccaggttgggtcaaagtggctagggcaaagtggttggggcaaagctacaaattaacaacatctcagcaaagcaattgtttaaagtacaggtctttttcaaaatggagtctcttatgtctttcctttctacatagacacagtaacagtcagatctctctttcttttccctacaattatcatcatattggttgatcgtattggttaatgtcaatatataatatcatcatcatattggttgatgtcaatatatgaaatataattttgagaaatcataactgagagtttttaaaaaataaatttcaactcacatggcttctgtgtgtttggagagatgaactggcaataagaagtgtggttgctaatagctgatgttggctgcgaggtagaattgtgttaaagatatttatttcctttataaacctatcaaaatcccaccaattagaattcgaataattatttttgtaattcttttttctgcatatgaaattggggttcttgacaacaaagttgggaggataattttcttccactgattcattaaaatgcctgatatgggagtttttgaagtaaaatttcatgtgcgagaagtttcttctggctttgggctgaggaacgctgctatgatttctgggaaggaagttctttttttttttttttttttttgatggagtctcgctttgttgcccaggctggagtgcagtggcgcgatcttggcttgctgcaacctctgcctcctgggttcccgccattctcctgcctcagcctcctgagtagctgggactacaggcacctgccaccacgcctggctaattttttgcatttttttttttttttttagtagagacggggtttcaccgtgttagccaggatggtctcaatctcctgacctcgtgatccacctgccttggcctcccaaagtgctgggattacaggcgtgagccaccgcacctggccggaaggaagttcttataaatggcacatgaatggttccttttgatgtattaacatatatagtggaagattttgtttttggttcattgctactaaaatgtttttgttatctgagaaggacttgagttttccacagaagtggcttaacactgcaggtgtgattcccgtgaagactctgtgtcatcacagtcctgtccgtaggctgtcctggaggagaggaacattcctttcatcttagagaaattcactctgcaaaatttatgatgactcttttctgccagaacaaatggcttttatccttttatatgtttaaggagctggaaacaataaaaaaaggaggggtggttgaaaactatggaatataaaatattcttgatttaaatagtgcaagaattgtggcaattcatttacaaacaaaatgagcaggctgtttattttagctgcttctctgtcagtgataatagtgactgtcttgaagcataatttgatttccctttctttgcaggccgttccaggtaccttttttaaaaattttttatttattatttatttttatttattttttttaagacatagtcttgctctgttgcccaggctggagtgcagtggtatgattatggctcactgcagcctctgcctcccaggctcaagcgatcttcctgcctcaacctcctgagtagctgggactacaggtgtgcaccgctacacccagctaatttttattttttttgtagagacaaggtctcactatcttgcccaggctggtctcaaactctgggctcaagcaatcctcccacctcagcctcccaaaatgctgggattacaggcatgaccaagtactttttttattacagaaattatactaactaccatatcatgcacatctactcttagcatgttaggtgtgtatgaagatacaactctctgaaggggtggagctgtcacaaccaaagatgcacccagatgattatcatcagccgacaaaaaaaatagcaaatccattttcttaggatcctataaatatttttgtcattaattctatttctgataaagcatttttaaattcacatgattgcatttcctaaaaagagttctgtctctataatattttcatttactaacatttgctgaagaggactaactaattgcctttgttgttcaccagctaatcatatagaataatacacattttggagccgatggaatgaggactggactgagaggggaaccatctgtatattagttctgctccgtggtcgccagctgtgaatcccagagatgctagtcatgaaaattctctgagctttgcattcttatccagtttcatgtcgtggataagaacacattctggctcaattcaaatcctgctctgatgtttactaacttggtgattttgtacaagttccttagtttctttgtgccttggtctcattttatatgaaacggaagcatctgttttgcagggttcgtgggagattaaacgagttagtacatttagaccccactgagtactaaacaattgtgagctatcactgtgatctataaaatgagggtggcgtacccatcttaaagataaaacatcatcctgtctctgatacctatggagcaacatgagcatgttttacaaaacactgagtggagtgaaaaatacagaaaacagaacgcgctttgtagcacatgctacttacatacataaaaaagttatatactcctcaagcaacatcacagggttttccagggtacatacatacctaaccatatagatcacattggagtgggtgcttgcctgtgtggcacatgctggctagttgctttgagaagtggttggggataagggaaaaaataatcatatgcaaataaaacaagttaataacagtgatgtttttatgtggcacagtgggtcctccatgctggcaggagcatgagtttgtacaagcacttttgtattggcttggtgttacctagtaaagctgaagatgtgcctagcctgtgatccagcagtctcaccctgggtctgtattcccttgtacctgagcaccaggaggtatgtatgagcaaaaacagaacaacccaagtgtccatctacagaaaagtggatacataaacctattgtactccaccaatggagtactatacagcagtgaaaaataaactccaagtgtctatctgtagccatgtatcagtgtggatggttctcatatgtgagtagaaaaaagtcacagattacatacaatatgattccacaaataaagattaaaaagaggcaacattaaaaagcatattattcagagaaacgtaatatgtgttgaaaagaaaaataaggaaaaaaaaccacataactcagcattggaattaccttgtcagggaggggagagttttaggggaaaggcataaggggcttctgaggtcctggggctgactgttgtggactagggagtacctgcaaaggtgtttgcttcttattctttaaattgcacaaatagattatatatcctgttttgtgtgtactatttgcaacaaaaataccaaaagaagagagaggaaaaattaggtggctcatagtgaagtcagtcttgagaggaaggtactttctagttgtaaaactcattgtactttagcaaatcatcacattagagatcacttggtctgatgctgttctagctgcaaggaaaggtgggagctactgctggtcaagtgacttccttgaagctcaggctgtgcctgttccaaagctgggcacgggccgtttccaagttgagtgtgtcctcctgccttggctttgtgagtttttccaccgcacccttttgcgatgaggaatgatttggagactgcttctgacttgggctcgtttattcattcaacaaacatttagcaaaccttccatgtaccccactgggggtggggggggagggagagaagggatcaaaaagacacagcatctgccactcagggcatgggtcacctgttctcaaacacttcgggcacagcgaagctgctagagagggacaggggagctgctgctggggtctgggcaggatctcaggggggctgcctgtagtctgcaccttcacctgctccactggctcaccccctatcacccctgtgtcctgccgacagcatctatgttcagcagccgctgcttctgcctgtaagcctcctggcagaggatcttcctgggatcacaccttgctgtctcttccaggtgaagcaggcaggtgaccctcgggtgcttgatgaggctgggggttcataggtccactcacctgtagcaggcgagtacagatgcctgaagttggaccctccatcgacacgtcctctgtcctccagctcatgaagggtgtccaggctcaattcagctaagctaatcactagatactgctccgtaagattttgtgtgaggatcaggcaccaacaatggatgacaggggaaacaaagtcactgttcaggtttctagttgctgttcacatgtggggaaggactaaaaacccagcttacccaggatttgtttgtaattaggattttcaccccttggcttccttttccctttggcttttatacttttgctcatttttatgagtgtgctggggccagatgatctcagtgtgaagcttggctccacctgttactagctgcctcagtttcctcagctgtaaaatgggaatgaaatagtgcatctaccccatagaatcacgaggaataaattagctaatgagtttagagcattcaaagcggtgcctggcactcagtgagacttattatcacatcacattacgtattgtcaatataataatatgcacaccatgttaattatataacattaatatttttaaacaatatagcatattattaatctataatgttgtatactagcatactggtgcatatagcagtggaaggggagatactgttacatatagcagtggaaggggagatactgttacatatagcagtggaaggagaaaagtaagaaggggaaatcttacggaaaaaattaaattgacccagggtcagtacttcccaagaagtgaactgaagcacttctttcccacattgttccacggctgccgctctggaagtaacgctaaatatttctgaccataaaagacgctaaacttaaactctgtgtctgtttcatagacggaagagtctaaaacagtttcagaagtagcagcgttctgtgcgaggtcactgtgaagcctgagagcccagcagatgagccgagctcttttcaataacacgaagcagatgcagaaagcgcccgaatctgccttgcgaggaagggattaggcgatgtctcggggctggtgatgatttatcccatcgctatggcgaagggtggatttcacgatggagcccccactggctgacaaaagactcattgagttgtaagcatttctcacagtttgcaaatctgatttatagtaactgtgcttcacaggaaggtgaaagtttatccttttgagaatatactcaaaagagacagagttcccccgcccccaaagtctgtctactatgaagctgatgtaagtctttgatatgctgcctattttttctcaataaatcagctttgatcagtttccagcctggttagcacatcccgatgagccctgtgactttgtggccgtgtatagctgctttttcgttttttgtactttcatttttctgcaggatgatggcacaattaaaatttctacaatgagtacttttataatcagaaaaataatattgctttaaaatatcaagatatttaatatggcacaataatagagaccctgcctacagatttctttatgtgcgtggtctcgagctggactgtaccttctgtttctccttctcactgggttcctgcacccctcagggtcgccatgctgggcaccctccagggccagattccaatgcggtgctcagttcctgtagcctttggaacggtgttcagcatgtgtgcagcagggtttagtgaagtagtgaagtgttccccagacatgctgcacaatcccccccccagtctggcgattcctcgttaagattcagtgaggctgacattcagtagggggcaccaacttaatcaggaagtgtaagaggggtttggaggagattcacaatcacttcccaggagaatgggtggaagttgcgcatggttagcctagaccccctctggggcagtttccctgaggagttggttaaaatgcagattcctggtatctaaagcttcttctccagtaagtttgggttggagcccaggatgctgcagttcaagcacctgaagtgtttctgcgtatcttgctcagataattgatagttatcaacaattaacctagccttagataatcgataaatatttataaaaggaaccatgttttttgtttctttgtttcttcattgaaggctgctgtcttttgcgtggcttctgtgaatatcctagtcacacctctaagggtttagagagcattatttggccttgggtttcaaaacatcagcaagtctcttcggctccactatttggtgtcatagagcccagaagagaagtgacacttgttgcttcttccaccttataggaaattaacttaggaatcggagtcaataattttgcttagggttagcccccagtagttgagtgttttagagacatcagcaaggttggcatcactgtctctgacttagccctgtctgtgcaattgggggttgaggatcattatcctcgttgtaggactcagtgtggggccactgttgtgggggaagcaggaattggagggtacagtggttcaggacactaaattagcattttcccatggggacacccaactctttcttactaatgaataggaagaagtcctacttattatgggtttttgctggtttaatcttcaccttcttttccttctgtgtcttctttaccttctgatcgcaaaatcccatggtgtattggtatgaaagaatgatcattgataccagatcacccaattctgcccatctatacttctccaggaagtatctgagagcactattttatcacattctattgtggtttttaatctttgctgatttgatgggtgacaatggagttttatagatgttagcacttggaaacttgtgagcttgatcatctcttcatactcttcacacacttatcaacaagttacgttatctcatttgtgatatttttggatccaatttcaatctaatcattcagaattgctgggctacagcatgaactgaacagatgatgtccccgcctgcatgaagcttccattcccgtggctgagatagaatgtgctcaagggaatagttacaaatcaggtggtgctggttggtattctccagaacaaagcaggagaagcaagagactgaggaagggagaggtagaattttacacgaaaggttagggaaggtcatagggaggaggtgacattcaagctgagacccgaagggagtgggagcatgagccgtatgatcacacggggaagagtattgcagagagagggaacagcatgtgcaaaggccctttggcaggagctctcctggcactttcaagtaacggcaaggagactgggggctggcgtggagtgaggttaaagctgcaggatgtgagttggaggcatgctggtgaggctgtgttgtagacttctgttaagcaaggataagggcatttccattttatttggcacactgcgggaggagaaccattggaaggttcatagcagatgtgatctgattgaattttttaaagctttcttgaagtataatttacattggttgaagttctaaaagaaccatgttggctgttgtgtggggaacagtctagagggggaccaagagttgaaacagggaagaccaattaggaggccattgccaggcaccaggcagcgaaaggggaggtagtgagaaatgatcagactggggatctactttgaaggtggaaaagacagcatttgctgatggattagatatgcagtgtaggagagtcaaggatgactttaaagattttgtttgtaactgggtatatgatggtgccacctactctaaaagggacatctgcaagaggggacagttgcaatgagcaggaagtcaaaagtggggtttggctgtgttgagttggagatgcctgttggatatccaaattgtgatgttgagaggttgatatgagtctagaggtcatgtgagagatatatttgtgattcctaagcctaaggctatctgaggctgggtgactaggtgagatcacctagggaccaagatgcagaagagcattagggttgagctttgggcccctccaatgcatacaggttggaaagaggagggggaactacagaggagctgagaagagaagccagtggaggtaggagaagggctaagaaactgctgtctcggtgagatgaggactgaggattagccacaggctttggccacctggacatcattgtgaccttcatatgagtgatttgcatgggtggacaaaagccaccttgcagtgaatatgaacaaaaaaaaagagagagagagaagaagtgcagacagcttatatgcaaacaactcttttgacatgatttagaaggtgtagtgagtttctcagcaatttgtatacattatattttaatgatagttcccctcagctatgtaatatttgttgtgcagattgtttttgatgattattctacctattaatttttatgatgttccttttccaacaccccatgagataaacatttttctttgatcacatcaattgataattctttttatttttcccttagcttttaacttagaaaattttatctattttattcttctttttacttctgtgtatttaccagtattctgtatagcttgtttaatagatataaaagaaagtacatcttatcgtaaaacccaccgacaaagtcattcagcattcacaggagataaggcttgtggcatccaattcagtttccttcatcaggatttctgggttctgtgcaaaatgaacacagcatcactttgcagcagtttttttttttctcttagtcccctctgcagggttgataataaaaatagttgataattagcatggacacagtaattggaaaggggcataaaccaatcagaaaagattacaattgggagcaacaggtgtccctgtcacgttgtacaccactctctcccgataccttactcgcgagtgaattggatttctggctccatgcctttctggccttctgaattttgcctctctgtcctcggatccttgctatttgtctccttgccattttggggaaaaaggaggcatttactatgtaaggattatctgtgtgcctgttttatatgtttgctagattataaattacttgaagtgatcacataatcatttttgcatcctgcattatacgttatgtatgtagcacatgcttcacatatacgagttgactgaattgaataagcaatggcaacaatgaaacaagagtgattcagggactttgttgtattctggggcagaattgaacatgtcggtattcacttactctttattttctctcctttctaggtatgattgtaaccatacaaccaatttatagcagagaggacgtgctctcacggaccatgtgtctgcgctttcatagatacctacagactttattttttagagcagttttaggttcacaacagacttgagcatataccacaagtgttctcatataattcctgcccctatacatacatagcttccaccactatcaacattttcccacatgggtggctgacgtgtaacaagggctgaacctacatcaacacatcattatcacccaaagtccagagttctcattagggttatactttaatataaacaccgtatacccttggtgttatatgttctgtgggtttggacaaacaggtgatgacacggatccaccattataatatcatacagattagtttcactgcccctcaaattcactgagctgtgtctgttcatccctcccgacctcctaggccctgacaaccactgatctttttacatctccatagttttgccatttccagactgtcatatggttggaatcatacactatgtagccttttcagattttcttatctggtatagtaatgtgcatttaagcttcctcctcgtcttttcatggcttagtagctcttcttaactttttaaaccataaaactcttttaaaattaggtgaatactatatattttctcccaggaataagaacaaacacgcacacttttatatgctcatggatctattgcagtcaattcagtacctcccctcaacccacctcccacactctcggtcctgcaggagctgggataccaggtcagccagtccctgcaacctcttgaagcagttgatgaaattgaaagtgaatttttctttgcacctatcttgctagaaactgtgttgctccttgagctcagtaggatagaagttctttgaacaaagacagtttaagaggtgcattatcgatttaaatgtagttcagatcacagatactcattctgtacttttgcatgcaggaggacggcttctcaaactttaatacatccataagtcacctggggaccttgctaagagcagatcctagttcagtaggtctagggcaggccttgagattgtgcgccacaaactacccccaggtgctgctggttctgctggcctgaggaccagcctctttaaagccaggctggaaagccctgttttccaaactacaggtcatgacccatttgtctaagtgagtcaaggccagtattaacaaaaggaaatgggatggagtaaagtggaaactatcagggcacatcacatacagaaagaaaaagtattatttttgaagattttgttttagttatatatgtgcgtgtatgtatgcatgtgtatatatatataatatctacacactgagttttataataatctacattagtttgtactctggatacattctgtgtagcaagaaacaagggtagatgcactacgttggtttcgttctaaataatagtgagcttgcaggcataaaattgcacatgtgtctccgtggattttgctgctcagattctggtatccagatgttgggattttaaccaaggctgtaaatagcagagaaagtttttttattattttaaagatcaaattccaaaattctggttgtgttttacttaattgagagtacatgttacttctgagaatgtactttaaaaagtaaacaaatttaactgaagcatggctattagttagtgattctttgtagattttctggaaagtcttgtttgtttgtattaaacattaactctgctgtatgctgtaaatacactgctaagatcaatattgaaaaacgaacaataataccaattcatatggaccttcaaattagtcttataaaattttatgatatggtattatccagccaactgactttgagactgacaaaatatctaactttaaccaggtgattcttgcattctttgttttaaaacctcaagtttaaaatatctttatatttacatttaattgtcattaatcaaaaatatatgcctaaagtaacagtcaaaaacaagtcaattttttctgacttgtgttgtttgaaaaagcccccagttcaaatatttactttctgttattgtttgaaaaaaaaaaaaaaaggattgtgtagaatttacccatttcattgtgtgttacaaaagtgacctagagcctgcaggtgtgacaaggggtgttgggtcatctccttacctgtccaatttcaccttcagggcacaatgtcctgcaagaattatatataaaatagacaatgttggcaatgagcaaagacatcaggaaagaaaacagaccaagagggagaagatatttttacctgtgaatcatttaaacaatatgctgctgttcctgttcctcagtcttttatgataatggaaaactaacatatatccaataaaaggatttagaaagacctgttacttgattcctcaaacctgaaattaaaaacaaacgaacaacataacccttaggttaggtaaaacataccatgtgaagaaatgtggctctgaataagaaaaaaaagacattaaaaaaaaccccacattttatagtattaaaaagtatgtgttagaaaaccttttgattgatattaatgcatgacataaatcaactgaaggacttattattcttgcatcaattaaaagcatttagacttacctgaaaatctgaaagtagcatgttacatacaaccctaattattgtgtgccctcatgtaaacagcaacatttgatgatcagttcactccatgaggaccacaatttgggaagctttctcatttcctttgaaatggctaaatagcgtcatgggtaattggaattatattaaattttattttccagaaaatgagtcttcatgtaggggcttggaaagtcactttttgctggtattggttttaggagtattgtgttagttaggttccctgggaagcagatgttgagacggaattaggaatgttagtgttttattggagggggaagggggctgtgcctgtgaaggataaaatgaggatgaagcaagactgggcagggagagcctcagaccaggtacagatttgatagtttgaccaacccaacggggaggtctggagcagagcttgcctttggaggggccccgggttgggcagaaatgaccaggctctagtaccctgctgtgtcagtgattggctcagggctgtctgggatgaggcagggcctgaggtgtgaacagctggaggttgttcagatgcatgctagattctttcttgaagggagatcctagtgggacacctctggggctgccatagcatctgtagaagcaggaaagggatgtagctggttccttctgaagctccagcagggttatcatttgcttgacattgtcaccctccttgtccttttttgttgttgttgcaaatttcccttttgcaagactactttctgctcagaactaaatgcccttcactcacaaaatctgtataattttcatgacctaaaatggcttctgtcctgagtgcttagatggggtcatttgctgttggacagtcccactactgtcaagtgccaccatgatgggaaattgtaatgttaaagaaaagatgaggccgggtgtggtgtctcacgcctataatcccagcactttgggagaccaaggtgggtggatcacctgaggtcaggagttcgaggccagcctgaccaacatggtgaaaccccatctctactaaaaatacaaaaaaattagctgggcgtggtggcgcatgcctgtaatcccagctacttgggagactgaggcaggaaatcacttgaacccgggaggcagggggtgcagtgagccaagaccgtgccatggcactccagcctgggcaacaagagcgaaactctgtctcaagaaaaaaaaatgattattaaaaaatttgttttagattaattttattgttggatgtttcttgggcttagacctttagataaaccattttgactctatttgttatattacctgcctctactgttatttaaggttgacgttaaatttctttcagtgattttgttaaagtctgtcatcagttagttagacctgaaatctaaatgactaaatcgtgctggccattatatcaacctttgtcctctaaaaatttgggtcccagagttggtctttaattctgcctggggctccatctcaaaaaaaaaaaaaaaaaaaaaaagggaaatgggatccatggagaaggatctattattttttttaccaagtccattgctgccaagtggaaagaaccccctcagaatgggtcatcagcaggcaggtgtgttccaggctctgcaattctcccactccaacctcctgcttctgacagatttaaggatttttggaccagaaaaaaaagtactttgggaggatcctcctatggatttccttgttctgctcctgatctctctgtgccagcccatcagctaggattcatggagcaaggtctgtggcttcaatgctgggtgctcttttgctttcattgtggggtactcacagacaccctccagcctgaggcaccggttctgccctgtgcatgcaaaagagactgtgtctccatatcgccatcacttcccctctcctttcttgctattgttctctttatattcaaattatgtagttggtacttttaatgttattttacatttccttgcaccttgatgaaagacattgtgtatttctcacctttttctgtgctgattttttatctgctcacaaatattgcctttatgactccatttctcttaaatgtggcttttaagtgtttttggttcatttgtggaaatcatttactcttccctcaatttgcgctgtaactgtcacctccgtgtgttaagtaaatcggggagatttctttatttctacatttggctttccttattgatacgtgataggaaagaaagtaattcccaaggaagactatcccagtattgtaggaatgttgtggcaacattaagccccactccatcttgcatttccatacttttgccatttactattcaaagatttggagactgatggaaaactatttcttgtttgaggcacacacactaatgtttgactttggatgagaaatttttgaatgtccttggaaaagtagaatgctgacaaggaccttgagagaagggactgtgattcaccctgtcttaaagaatgaaacttaaaactattaccaatataatttgtaccaataatagtactcatcttcttattactttaatctcctattcagtttaaagtttcttgctaaccccagtgttgacctgtttcaggctgggaaatctcagtttggacagaaggtgtggttggtcccctttctccatggtacatgtccatttctcctgctgtcatctccttgcctcttctgtgcccttgaaatcaatgatgagttgagtgaggttcaccagaccaggtttggggccaccctcagcagattctgccttaatagtctggtacctcttttttagaatgaggtctctgccaaaactgtaggacccccccccaaaacttagcatcctgatttagatcaaagaaaaaaagcaaaagatgataaaattaaatataaaatgccagttgccataggatatataaaatgataaaatagttccaaatcataagtaatttttaaaaagttttgttcattagttgaagtgcagggagaacactttgtacatcttcctaatctcagctaattctgcatctttaggagcaagaagaagggttaatatgcaggtgatgctggggtgcccatcttcatagaacagatgcccccaaagtcatacccagaacattctaagagtcttttgagaaatccagggaaatcatccacagaacacatggttttccccatgtggttaggattttatctttacctttaagaggttttacatctaaattgtcactcttattctcattggttaacgttctcagagtataatgccaagacgtctaaattgttaaaaacttaaccttttaaaaaaacatacacatatattagttttttttcaagctaatatatgtttgatcattgatcctcagagattcctacaaacctcaggttggtcccagaagtccgggggatgtcttctaaaagtgggtgacacaaagacttatgacttgcagcctagagaagcactgtctgagtgaagcccaggggccaactgtgtagcttctcagctgctctatgtcctggatctttccattttattctaaaatagtatattgcaatattgaaattcaatatggaaatatttccttgtggctttaaataaacttttcaggaatgcatattagcaactaaaaatagagaaagtctcaaatttctccacttttccaaagctattctggagatttaacacttttcttagcactctgaaggatagaacccatgatatcagtggcacaaggtcacagaaacatttagaactttctcttcctgagtacacatagctttggagtagctgaatacatgtgctttgtgagttcagtggagagtcccacaaaacacggtggaggtggcagaacctggaagacccagtaactctatgtgacggctactctagtggaagcctgagttctctattgggtaaccttggatgattgggttaggctctgctgagggtgctgggcagatgtgaggggctaccccagcgttaatcagggtaggctaatagctctaactctcaaatttcagtggtctaaacaaagtttatttctcactcctgtaacagtccagtatgggggtctgggtgcggtgggtctcctcagtagctctctgatgagaggagcaagagaaccctgctttcttcccatccagcctctacctagccttccccccactctgtgtcctcagaagcctttcttttcagccagtgggtgggagaagaatggaagattgcatgtagacctgtttcctaggccaggcttccatctacctttcattgaccaggaatgagtcacatgaccacacctggctgcaaaggaggctggtaaatatagtctgtctgggtaccaaggaggaaaagggatattggaaaggcttggcccaccccttttgtatccacaaaaggctgcagaaatgtgattggctcatatgccctatctcctcctatctccagagatgtgacttcttctctccttgggtgactacaaaataataatcttcttcattttttctcccatgacaaatcttgatgtcactgtgaacaacaatctaaaaaagtaaagattatatataataattatatgtaatctcaccaacccagatacaattaacattttaatcgttatatttccagtctatttttccatgaacaatattacatataattatttttgccaaaagaggtcatagtaactgctattttttcaattttttgaaactgcccttttatcatcccaaaatattgcatttctgcaatatggcatttttttttccatgtccctagaaactgtttagtgacctatgcaatttcatcctatgtatattctatacattttaagctaaatattttttgttggcttcagattcttggctgttatatacagggctatgttgaatatcctgtaactatctttgattaaatctatgataacttccttaggttctaatcatataagtagaatttctagaacaaagaatatgcaactgtccaaaatttttacatatatttccaatttcctttctgaagacttttaccagtttaagcacataccagtatatgacattacttgtttccccaatatctgccaatatttgttattgtatttttataatttgacagtacaaatagcaagaccttgataggtcacatttatttgcatttctttgattattaactttattagaagtgtactgatgatttatactttttcatgtccttagtccatttttccatgtggacttgaatttttcttctttatttcctcaaatgtgttgccagtgtcagacatagtgcatatttcaatatagatactcaataaaaacttgttaactgaacaaagaaaattatgttaaggatgtaacatataagttacatcctttatgttaaggatgttaaaactctgtcaaatgtgtttcatatattttctccagaaattgttgaaatttttctattaaataataatattgaaaatagaaaatttttgacaatggatatattatttttttactgagaaaaaaaccaaaactattttttatagtctttcaatatatagtttcttaattttttttttttgagacagagtctccctctgtcagccaggctggagtgcagtggcatgatctcagctcactgcagcctccgtctcccgggctcaagcaattctcctgcctcagcctcctgagtagctgggattacaggcgtgtgccaccatgcctggataatttttgtactttcagtagagacgaggtttcactatgttggccaggctggtctcaaactcctgacctcaggtaatccgcccgcctcagcatcccaaagtgctgggattacaggtgtgaaccactacccctggccagatttttaacatgtcatttaatttgttaacatttttttttgtgaattctttagttcatcctgacagaggctgttctcatcctaaattatataactattcatctgtattttctttctgtgttttatggtttaatttttaattaaatctaatctatttggattttttagatgtataatgtgagatagggatttagttttttttttttcctttctaacttttattttaggttcgggggtacacgtgtacgtttgttacgtgggtaaattgcatgccatgagagtttggtgtgcagattatttcataaaccatgtaataagcatagtgcccaattggtagtttttcaatcttcacccttcgtctaccctccaccctcaagcagcccctggtgtctatcattccattctttgtgtccatgtgtgctcagtgtttagctcccacttataagtgaaaacatgtggtatttggttttccgctcctgtgttaactcccttaggataatggcctccagctccattcatgttactgcaaaggacatgatttcattctattttatggctgtgtagtattctgtaatgtttgtgtaccacatttttttctttatccagtccaccactgatggacttctagattggttctatgtctttgctattgtgaataatgctgtgaataatgcaggtgtctttacagtagaacaatttatattcctttatatacccagtgatgggattattgggttgaatggtagttctattttaagttctttgggaaatctccaaactgctttccacagtgtctgaactaatttacattcacacacgcagcatataactgttcctttttctctgcagcctcaccaacatgtgttattttttgacttttaaaattgccgttctgactggtgtgtcatgatatctcatggtggttttggtttgcttttctctagtgattagtgatgttgagcgttttttcatatgcttgttggtcacacatgtcttcttttgagaagtgtcttttcatgtttttttggcccattttttttaaagaagttgttttttgcttgttaatttgcttaagtttttttttatagattctgcatattagacctttgttggatgcataatttgcaaatattttctcctattctgtacattgtctgtatactctattgatagtttcttttgctgtgcagaagctctttagtttaattaggtcccatttgtcaatttctgtttttgttgccattgcttttggagtctgtcatgaaatctttgccagggcctatgtccagaatggtatgttctaggttttcttctaggtttttatagttgtatgatttacatttaagtctttaatccatcttgagttgatttttgtatatggtaaaatgaaagagtctagtttcaatcttctgcatatggctagctagttatccaagcactatttattgaatagggaatcctttccacattgcttgttttgtctactttgttgaagattagatgactatagatgtgtgacattacttctgggttctctaatctagtccattggtttatgtgtctgtttttgtactagttctatgctgtcttggttactgtggccttatggcatagtttgaagctaggtagtgtgatacttcagctttttggtttcctagaattgctttggctatttaggctcttctgtggttccatatgaatttccaaatagttttttctaattctgtgaaaatgtaattagtaatatgatagaaatagcattgaatctataagttgctttgggaagtatggccattttaacaatattgattcttcctatccatgggcatggaatgtttttccatttctttgtgtcatctctgatttctttgatctttgttttgtaatacttgtcatagagattttcactccccagttatctgtacccttaagtattgtattttttttgttgctattttgaatggaattgcattcttgatatggctctcagcttggacattgttgatgtttagaaatgctactgatttttgtacattgattttgtatcctaaaacgttgtgaaattgtttttcagatccaggagtttttagacagatacaatgaggttttccagacataaatcacgtcctctgtgaagagagatagtttgacttcctctcttcccatttggatgtattttgtttcttttttttttttttctcttgcttgattgctctggctaggacttccagtactatattgactaagagtggtgagagtgggcatccttagcttgtttcaattctcatggggaatgcttccagcttttcctgttcagtacagtgttgctgtgggtttgtcatagatggctgttagtattttgaggtatgttctttcaatgcctagtttgtcagtgttttaaacatgaaaggatgttgaattttattggaagtcttttctgcagctattgagatgatcatgtggtttttgtgtttagttctgtttatgggatgaatcacatttattgatctgcatatgttgagccaaccttgcatcccaggaataatgtgtagttaatcatggtggattagctttttgatgtggtactggatttggtttactggtattttgttgaggatttccaaatccctgttcatcatgaatattggcctgaagtttcttttcttattgtgtctctgccaggtttctgtatcaaaatgatactggcctcataaaatgaggttaaggaggagtctttcctcctaaatcttttgtaatagtttcagtaggattggtagtagctctttgttatacatctggtagaatttggttgtgaatctctctggtctagggctttttctggttggtagtctttatattactgatttaattttgtaattcgttattggtctgttcagcgtttcaatttcagactttaaaccaacaatgatcaaaaaagacaaagaagggcattatataatgataaagggtccaattcaacaagaagacttaactgttctagatatgtatgcacccaatgctggagcactcagattcataaatcaagttttagggacctagtgagagacttagataaccatacaataatagtgggagatttcaacatctcactgacagtattagatagatcatcaaggcagaaaactaacttaacatatttgagacctaaacttgacacttgaccaaatggacctaacagacatctccagaacactgcacccaacaacgacacaatatgcattcttttcacctacacgtggcacatacttcaaaattgactacgcacttggctataaaacaatttgcaacaaatgaaaaaaaaccctgaaatcatactagccgtactttcagaccacagcacggtaaaaataaaatcaatgctaagaatatctctcaaaatcatggaaattgaacaacctgctcctgaatgacttttgggtaaacaatgaaactaagacagaaatcaataaattatttgaaacaaatgaaaacaaagatacaccataccagaatctctgggatacagttaaagcaatgttaacaggaaagtttatagcactaaacactgatatcaaaaagttggaaagatcttaaattaacagcctaatgtcacacctggaggaactagaaaaaacaagagcaaaccaaacttactgctagcagaagaaaagaaataaccaaaatcggggctgaactgaatgaaattgagatacaaaaaaaccatgcaaaagaccaacaaaaataaaagttggttttttgaaagaataaataagattgatagacaactagctagactgataaagaaaaaagagagaagatccaaataagcataatcagaaatgacaaaggggacattaccactgaacccacagaaataaaaaaaaaacctcagagactattaaaaaacatttctgtgcacaaaaattagaaaacccagaaaaaaagggataaatttatggaaacatacaacaccccaagattgaaccaggaaagaaatagttatttttcctcaataaatgattgttctgttgctattgaataacttactttccaactgatatgaaaatgttacttttatcacctcctgaattcttttgtgtacaaaggtttgcttttaaattatctattctgtttcctcaatccattaatcgtctgtcaattcctgactgctacccttgctgatttatctgccttatgtttttttgtgtgtgtgtcacaaaccttgtgtgaacccgagtcccatttgcaatgatcccatctctggctggttgtagttatagtctctgttttctcaattatctcaaagccacctgctcatacataataggctgtcttagcttgggctgctgtaacaaagtgctatacattgagtggcatataaacaacagaaacttatttctcacagttctaaaggctggaagtctgagatcagagtgtagcagggttgggttctggtgagggctctcttcctgattcatagatgtccatcttcttgctgggtcttcacactgtgacaaaagggtgagggaatctccctggggtcccttttgtaaaggtactaatgcaattcatgagacctccatccttatgacctagtcaccttccaaaggcccctcctcctcatactgctaccttgggggtaaggatttaaacccatgaattttgggggcacacacacattgcagttgacaaacacactatgtgtctgaacacatctcatgggcctccatctattactccaggaccctcagctcctgcttggtctcagtggccaccccagcagattgactccttctgggtgtgagggcttccacagctcagggccagcctgttacctgtcccaggagggctggcccttctttcctgtgactcagcaaccaggtcaaaaggtttccggatcctcttggcatttctgtacttggatgaagcaccccaccaccgggcgtagaacctgacttttggagtggtcaccttgggagcaggtgacaacccagacatgcagggtgactctgaccaatgaggaaggggatgcaggaagaatgtaggcaactaagttcctatttttcctccaccccatgggctgctgtgaggtagaatttttccgtgtaacctatcagaggcatctgcatggccaagggaaggcaggggctcagtgactggctgtctccatgtccccagaagctagtgtagtgacaatctcactcgcttcccctcactctcaccgccccaggtttgcacctctccaatggagcaatagtatttaatttttgtgtcagtctgtgttcaaagaaatctaggttaaaaaaaacactgtgtcctagacaaggaagatattcatttctgtattactgctgttttttcttttctttgtactttctctttttttcatagaaaattaatatttgcacccaaagaagcctctgtttcaaaagactcagctcccatgactttggcatgttacatacctaagaagcgtaaatgcaaaacaaataataaaccccaacaatcaggacattgtgcattactgtatatgtgtgttttactttgccaaattgcagaaaagtagattgaacatctagattagggaagccaaagctataacacgtggatagacatctttagttgtagatttcggtgaagtaagataactagctgtttagatctctccctgtccagggtgcacagctacagctagttagtgtcaggatgtgcaatagtttggggtccttattctgaacttctctatactctaggagccttcagatgatgcctttagtatgatgatttatcaccctggatgcaggaaacatctaggaagatgtttataaaaacattatacctgtgccccaatcccggagatttcactggtcaggggtgggcttgggcatggcttttttgttttgttttgttttgttgttttgttttgttttttgagacagagtcttgctctgttgcccaggctggagtgcggtggtgcgatcttggctcactgcaagctccgcctcctgggttcacgccattctcctgcctcagcctcccaagtagctgggactacaggcgcccaccaccatgcctggctaatttttttgtatttttttagtagaggcggggtttcaccatgttagccaggatggtctcgatctcccgacctcgtgatctgcccgcctcagcctcccaaagtgctgggattacaggcgtgagccactgtgcccgtcccaaagtcatgctttgcagagtttctacaaataactgttcagtttctctttagaaatcatatgactggccaggcacggtggctcacgcctgtaatctcagcactttgggaggttaaggctggcagatcatgaggtcaggagatcgagaccatcctggctaacacggtcaaacgtggtctttactaaaaatgcaaaaaaaaaaaaaaaaaaaaaaattagccgggcgtggtggcgggtgcctctagtcccagctacttgggaggctgaggcaggagaatggcgtgaacccaggaggcagagcttgcagtgagcagagatcgcaccactgcactccagcctgggcaacagagtgagcttccgtctcaaaaaaaaaaaaaaatcatatgataatggtctctgtttaagagaggaaaactataaggatcttggaatcgttgcctacattgacttagaaagctttatttttagaacataattttaaattttgaactaattatgaactattaacttatatatgatgacacaataaaataaaagctgttttgatttcttggtggtacttggtggaaagccagtttattggggcaatatactgtcctcaccctcaagtgatcacagattgctcaggggacataagaggtggggttggggagctgcaatttttgctgtcattgaacagcacaggggtacaatttgcatcttttcaggtattcctctttgctagaccttacgggctagaagaaattaaagagaatgaaatggtagagaattttttttggagaaaaatatcatcacacatattaccaatgtagaacaattatgattataccgttttaaggatctcagatattttcctgcttagagtctatgtattttcatttaattattaaaaagtacaggattatgtaattttttttgcattttatgccttgtggttagaccctaagtattaaaaattgcctctacttaacagtggtgcagtcttaaaaattctggctatggtagcaaaggttctggtgttggaatattgttggcctattagattcagggaactattttgatggttaagagtatttctgactgggctaagggcatcattttatctttctttcatacctatatgtggttataaatgcctagttattttgtctatgaaaatcaaatcagtttctacaacataaacagcaaaacaaaaagcatccatgaatcagcaaactttgaagtggaattttagcactaataaaagcccttgcctatgatcgagtcgccctctttaatgatttgcaggtcactgttcatcttttcctttccttgctttaccattaaataaatctctcccaggtgtcccagagagactccttagaggcagcgttccctcttgtcttgtgagaataagtctaagacactcttcattttggtgagttgatggtggggtttgtaaatatccatatggtcaaacacgcattggttgaggccatgcagatcttgttgagcaacacagaatgcatcttcgtaccttcttccctctccagcccaatccccaatattttggcaagaataaatccatagctgcaacatgggaagctagatattcatgccaaatcacgacatttgagatcaacaagttagaaaaaaaatccatgacttttcatgtagcactttagggtgacctggctcagaagttatctagggcagaccaggccaatggctatgggacattccctgagacatcttttggactcttccttcttccaacaccctggctcatattcccactcaaaggaaatggcaggaagtgacctacagacaggcagactgtctgcagagagcaaaaatctcctttgaggaccacttcatacacccacccacaaacatgaaataagtcataactgattcatcctgccagccaccagggatagttggattaattgaacactgttcttaagaaatattcagctgagggaggtcaacgaggagatcaacaaccaggtacaatgggaagctcagctttggtattctgtgctgcacactccacgtttacccagaagatgtgtaattgcttctgagaagctgaggccaggagcagatacctctaacaagcgtgttctgagtgttctctatgagacctgggagctggaccaggttgtttcttagcgctacctccagctctccctcattgttcttcttttgatatagacatcgtgatttggaggaggaatgccttggcagccagagtggagcagtcgaaaactgtgtatcataaaaatgaaaatgcattctcttaggtttgtgggcgcttgtgtcaaggcctgaagaatgagctcatatcacaatattgtggaaatattgtgattgtggaaaacgtattgcatagtaagtgttgcctgtgatagtatcacatgagcatacacccgcacaagaagggtgtgctggagtgggcgtgctagagtggcactgaaggaagcacagtactatcttttcgtatggcatgttggctttgtgtttgacagtaaagggaataaaataaggtcctcataattggagcacttctgtgtgagtagaggaagataaaaagaagtaaaaaaagaagatagaaaaaagtaaaaacttcaatgggattttagggggagtttgcacttatatccagcatataggaaaggctttgcagacagtgggacaagatgtgggctctgggagatggaccagggcaatgacagtaagtgctgcatacagaggagacacctaaacagctgactgggtcttgggagtctgggtatggaaagagttaaagatgactctaggctcaagcctggaagcctaaaaggtgcagacaccatttctaggaataagaagtttcatggagaaggatggagttggacccaaaggagaagagaggagaagtctgtagatttggttcgcaatctttgactttgaagagctgagaagagatgtttagtaggaaatgagttggagttaatgagacactgtggagttggagggttttgaagaccactgggcaaggggacagtttctttgggattggatgtggtcatgtcatgaaagctttttcagtggagctcagtagaagccaagttgcaagtaattgaagagaaagcaggcaaaatgccaaggcatgttgatggtctctatcatgtttatcgttgtgtctgagaattgtagcaccgtactgactcaattaacttttgttaatacaagggaaagtgagatattgaatgttagcttaagtggagtcaagagatgttttggattatttattttagggcagaagaaatttctcttgcacagggaaaatatccgtcacagagaaagggaggagatgcaggagggagaagacagcaagctgggaaatcatggcagtgtctgtctcaggggcgcagatgcagggattaaatttggaaaggagcaattatcaaccctacgttgctaaaggatttgggagcaagggagcgtttacctctgagtcaagagtgaagggggagaatacaggtgaagctattgagaaatcccaagagtgggaggtccaggttgaaagaacttacattttatggcttcgttactctaaaaaagtatatagaaaacaaggtcaacctttgtgagtaatgtgagagtagttttggggtaagaggcagcagaaaggaaggttttcagcagctgtgtagagaattatataggaagtgaattaggagtgaatgaaaagaagttaaggagtgaatgtaaattccaaatggattttaaaaattatgagatttgtggtagagacagacagtattagccgcatgctttttctccatcagtgcttagttctttggcactggggtggagaaagaagaccaagagcgggtagaagcttcctggttagtaagaggatgagcaatttcagggaactagtcagagcacagtgagctgactgtggggaggggagaagagccctgagttgataaaggtcctgggaaaataggatgagtcaaagaaggagagagcttcatgagcatccaggaaggcttcagaaagagcaagggtgaggcagagatggaaggagagaaggctgtggttagagagaggaattttcactagagattttttttccctcatcagttcaaatccagcctgggctgtgtaccttatataatcattttcatcatgttggttggcttgattttacggtttctgtgttcattagaataagatatcctgggaaaggaaatgtaaagtcgcctctcttctgccacagtaggatcacgtttgaagagtcatgtttagttccagacatttcctttaactatgtattctctgcagatcccactggtaccacctgagaaatactgaaaagagtcactccccagctccactgctctctttctggtccaagtcaccgtgatcctgtgcgtggatcatgactctgctttcctaattgtcctcgcttctctgcaagcgagggtctgttcttcacagggagccgggatgactgctagacattgtcagtccatgtggctccagcgctgccagccttcctccagggcctgagggccctaaccacctgatcccggttacttcttcagcctcatctcctaatgctttacccttggttctttctgctctgcccacacaaacattcttggtattcctcaccccagggcctttgcacttgctgctcccgcaatccggaatgttctacccatcatttatgacttagttcctcactttctttgggtcttcatcaccttcacagtaaagccttccctgaccacactattcaatagtgttccccaggccgggcttggcagctcattgctgtagtcccagcactttcggaggtcaaggcaggcagatcacttgaggtcagaagtttgagacgaccagcctggccaacatggtgaaatcctgtctctactaaaaatataaaaattagctaggcatggtggtgcatgcctgaagtcccagctacttgggaggctgaggcaggagaactgcttgaaaccaggaggtggaggttgcagtgagctgagatcgagccactgccctccagcctgggcaacagagtgagacttcatctgaaaaaaaaaaaaaaaaagtgtttctcacacatcaccctgtcttccttcccacttttatatccccttctcacaggctattaactttactcttttatttttttctttactgtacgtctcttccaatgagaagggaactccacaagagcaggggtttttattttgcttgtttgtggctccatcctcacttcccagcccatagtggatgctcaatgatgttcactgaatgaatgaatattgaattacctggctataaaagtcatatatgcccattgtagataactgggaaagcacagaaaactatataatataaagatatgtgtatatacacatatacatagctctatgtggaaataacctctgctaaaattacagtggaattgctttttttttaaaaaaaaacacacatatacatatgtagtttatgcatcagtagggatattggtaaatagaatgagattgtgggtatatgaccaaggggataaagatttaaaatcatattatctgatggactgtttttgagagatacttaacctggagatgaccaggatttggagagcataatatacattttagatatttgaagaattatggtgtctaagatgaagtatacttattctgcataattctggactagagcagaatccacactactggggaaagatccagaaagggtagtgttggctgcatagtgagattaattctctccggtgggccacccatctgtagggctaaattttgaagaacagagcttgacatccatagaagttcaaatagaaacacaatggcctcctgcgaggtatttgctgcttgatggctgtcgtctaaagaatctatggtagaaaagacacatttaaaaaacctttaaggcagttttaaacagctaacagtaaatttgatagcaaccacaggacattgcttatatgtctgtgggtattttcccttttctataaaatatcttttctatctattacagagtagtaactcacatggagtatctatttactgtttattttgtctcttatcaccccattggtcctcacagttttaagtgtcgtattatcacggaagagagtgaaaatgcatttcgttagccatgcataagacagattagaccaacaattcattttcttttaaccaatctatttctctatttttagaaatacattactccagaaacatcaggaacacattaagctccataataactgagattttaaagccatgttttgaagaccctctaaacccaactgatataaacacatttaagcctgacatggtcatgatgtcatttgtcctgtaaacatcttttagcctttggagaaattgtagcagacatatcagcaggattcataaacaagccagtggaaaatacacacagagaagttcataatttgagtaatttgtgttgaaaaatcacaggacatcttgatggatttataactgtcgtgataaaattaacagtgcataggccaggcgcggtgactcacgcctgtaatcccagcactttgggaggctgaggcgggtggatcacgaggtcaggagttcgagaccagcctggccaacacagtgaaaccccatcatctctaccaaaaatgtaaaaaaattagctgggcatggtggcacggccaagtcaggagaatcacttgaacccaggaggcagaggttgtggtaagctgagaacacgccactgcactccagcctgggcaacagagcgagactccatctcaaaaaagaaaaacaaaaacgaaaataaacaaacaaacaaaaacagtgtagagtatttttactttgaagctattggtactttccaaatatctgctttttaaaaatttaatttaattttacgttccaggatatatgtgccggatgtgcaggtttgttacacaggtaaacatgtgccatggtggttccctgcacctatcaacccatcacctagatattaggccacacatgcattagctatttatcctgatggatattttcaggatatctgtttttaagaagaataatgtgcattcatttgaattgctgaagtttcgttaaattcactacaaattatttatcctacatatattttaagtcagttttaagtaagactgtttttgaaataaatttgaggtattttagcataaatcactcacaaaataatttttaaattctgtaaaattctatttgtttgactttattgccttaagattcctgttatgattgttttttgagataaatttagcagtacatcagtcatttaaggtttattttacacttgagcaagtggcaatgtgtggcataaaacaagccctccctattgttataaatgaagtgtaatcaagtagattataataatgcaaggtgaaatgggagacaaagcagttcttagccagtgctatccaggcaactcacctttgtactccgaatttatctggattaccaagataattgaggggatttttgctcaggtaattgtagttgggtaatctggacttctcttccaatttgatttgaatgaagcctcttaagcagaaacatatgggcatggaagagcaagcatcggaactcttaaagggcaataaaaagtatcctaaggatttataattggatggcgtcttccatccagatggattccacagcattttaaggcttgtaaaggaaggccagatagacgtaccacagtgccctttccactccaagttgtggtcaagtgtagtgaaatttgcagcacacgaattcctgcttccttcccttccaccccagtgcctccccagccacccaagcgctcaaaggcagagctaaagcaaggagctccacccagagccaaagctttcctgatggattctgctgcattgctgggttgtgctggtcctcctctggtaccttcttaatctttgctaaagatgtatgcccaccattgtcacccccaaaatgtccatatactttgagcttggggttgaccagtcagctgacaggtggcacatactttatggaggcagatggaaaaattttacattcagcagaagagcctaattcctagcaaggattggattgagaaacaaggagcattagaaagctccagaaggcggggtctcaggcctgcacatctgtcaatatatgatgagtgatcgggcctatgcctgagtgtaaccctccttgaggagggggtttcattccactggagcaagagagggaggtggatgttcttatcatctcatggcctcacaggggaatcatttgatgtcaggattttaagagatattaagtaattcacttgccaggggtttgcagtttactaataattttatttaacttttaggttataactgtcagggtgagtcagttgtgtgcaaagcataggactaggaagaggggtgatgtggagtgactgccttctgagcacgtggtttccttttggggtgacaaaaatgtttggaactagacagaggtgttggttggacaacattgttaattaaatgctactgaattgttcactttaaaactgttagtttcatgttatgtgaacttcacctcaataagaaaccaaatatgtttgaatattttttttcttttaactggcacagtggctcagcctgtaatcccagcactttgggaggccaagatgggtggatcacttgaggtcgggagtttgagaccagcctggccaacattgtgaaaccccgtatctactaaaatacaaaaattagccaggcgtggtggtgtgtgcctgtaatttcagctacttgggaggctgaggtaggagaattgattgaacctgggagttggaggttgcagtgagccaagatcgtgccactgtactccagcctgggcgacagagcaagactctgtctcaaaaaaaaaaaaaaaaaaaaatcacgtgttggagacgctgttttatacctctgtgatgagtcaaagaaggactgggaaaatgcttcaccctccaagacgccaacctggggtcagagcatgggtatacgtgctgtgctgactatgcttacggtcagtccctgagagccgctcctcgtctatgcacatataggagcatgacccattagcaaaacaaggtgggcagaggagccagacaggcaggggcttcaatggtaaggaatatgctcaaaatgacctcttaaaaaatacaacaatgatttgtaagtatctttaatctttagctttttcactttattcgtcgatttctgtcttctcatgcttaaaaataactcaaagttatatttatatgtctagaacagtgaacataggatgtgaatcatgtaattttacattttctagtaactacctacactaatttccatcatgtattttcttttaatacaatctcccaggatatatctgaagagtccagcatagccaaaatggaatctttttaatatgtaatcaatataaaaatgactaatgagatacttttttcatagaacatcttccaaatccagcatatattttgcacctacagcacatcttaatttggactactcacttttcaagtgatcagttgtcacaggggctagtggttgccatttagactgtgcagttctaggagttgtgatttttgttgcgtcctctctggtgtcaggagatgctcagtaactaaaacataggtgaagaatgataaacatcacattatgcattagtttacagcctcagcatcgttaaagtgccttcagctcacaatatggtgaatgacataaaagaaatagtattcttttccattttatgagtgagaaaactgagattctgagagctgacatctgctcatttattcctgcccaggaatggcttaactgctgctctggtttcctagttgtcttggacaggccctgggcagtctctgttcctggaggaaaagatttatgcactgtgaaagaaactcagtcattttttacagaagagaaaatgagtctcggagaagtacagtagctctcttggtggtcatgtgctagtcaaccatggagcttgaacaagaaccatgccaagagctcttttcaattccaggtaacaagcacaagcccacatgtcttctgtcccccagcctgctggccagtcatgtttggccatatagttgaaagcaaagggtatgtaatggaattacatgactccatttaaaacagagaagctgacagactagttcactgccttagccacttagccctgggacaaattctggctagataccaattctagaaacctggaatttcccctgacaatgcctctcccagtgcagctcagtcataaagcagggagtggctagatggaagcccattactccgtaggtcacttggtcactttggacacaattctatctccttgatccaagaactaagaaggagggagaaccaactagacccaggaatcttcttttttttttaatgagaagaaccatgtttgatttttatgactttttgttatagtaaaatatacataaaatttatcatcctaaccattttttagtgtacagttgagtggtattaaatacattcacattgtggtgcaaaactcaccatcatccatctccagaacttttttcattttcttacactgacactccaacccattaaacaatagctttccattctacccttctctcagcccctggaaaccatcattttactttctgtttctgtgaatttgactgccctaggtaactcacacaagtggaatcgtacagcatttgtccttttgtggatggcttatttctcttagcgtaagataaataagacaatctcttaactttccaaaggtccatctgtgttatagcatatgtcagaatttctctccttttctaaggctgaagatatcccatgatatgtgtatatcacattttgtttatccactcatctgtggatggacacttgggttgcctccaccttttggttattgtaaataatgctgctatgaacatggatgtgcaaatatcagttcaatttcctgctatcttcatgcggaattggtgaatcatatgttaattctatttttaatttttgaatcactagactgttttttatagtgactttcccattttactctcccaccaccagtgcataagatttgcaacttttccatatctccaccagcacttgtaattttctgattttttggtaatagtcatactaatggctacgaagtatttcattgtggatttgagttgcattttcccaatgattagtgatgttgagcataatttcatgtacttattggccattagtgttatctttggaaaaaattctgttcaagtcctttgcccatttttaaattgggttgtttttgttgttgttgttgagttgtaggttatatacatatatatatatatttttttttctggatattaatcccttattagataaattattttcagatattttctcttattttataggatgtcttttgactttgttgatagcttgtttgactcacaaaagtgtttaattttagtgcaggcaaatttgtctcttttatttatgttgcctgtgcttttggtgtcatattcaagacaggcttgtgaaatccagtgttatgaagttattccctaagcattttagagttttctcataagaattttagagttttagcttttattttttggtctttgttctattttgagttaatttttgtatatagtataaggtaagagcccaacttttttcttttgcatatgtatacccagttttcccaacaccagttgttgaaaagactcctttttttctcattaaatgatctttgaaccactttcaaaagttatcagaccatatatgcaatagtttatttctgaagtctctattctattccattggcctgtatatcttagaccccagaactttcaaggacacattgaattttactttcctctcacacactaaatcttgagattttgtcagccataaatttatctatttagttcattgatacgttcttttctgttttggttatgcgaagacttaacttgcaaaaagaaatttcagtgttgaaatatttttagccaaatcaatttagcattttaaagtacagcttgattagagatttgcacaattttcactttgcattttgaaatgtaaatactgatgacagacttccattgtcttgtttgctcatgcattcattcttcccttcaacatgcactgaatacccactaggtctcgggctctgtgttgggttctacacattcaaaaccatggtctgttgcctctaagtttagtggtggatacagctgtgcaaacagttgctttaacagaggatgcataaaatgctaggggatgcagaggagacgctgacgtcccagaggagggcttcacttagaagatgaggctggatctggtatggaaggatagataggagtcctcaaggtagataaagaggagaagagtattttaaacctgggatggaatgactcttcttgaaaccacagttcttttcatgtgggctgttttcccaaatggcttgttctttgtgttactactgaccagctttccagtatagagcctaggtggagatatggcttgatgactctggtgggcttccaaagcccctaagtataagtcaggtttggttggagattacctcagtgtctacctggagagtccattaatcgatttttaggggtaacttaccagcaagatatttaatctgagtctgatggaaatcatcacatgtactccatccctaggagtagagagggggctaattgctcatggtccatggcccacataacacttgccgtcagatgtaataacccaagattgggtccagaaatggttgcttaggcagggtaaaggaggaaagaggatgagatgtgaaaaaagcaccaagaagatagtgttgattaaaaaaaattgtgttttcttattggttgaaaatatgaatttaataagaagttctttctccccctgaaatcccatagcgttttatctgtattcctcttatgaaagaagcagctgtatgataatcaagcacgttaacttttaaacacaagtgaatttgtgggatcaacatggcaaaatattagaaattgcaattgaattgaaaaatctaggaagtatagcagttttcagcagtgaacatattttactttatattactgatatttatgtccttgcaaggctttaaatatagggtacttccctaattcgtctttgggtcttccaggctgcccagcacataacctaacacattgtgggttatacatgaaggaatgaacaaataagggaaaaaaataaaggtgttttgaaaatcataaaatattcacgagtgtaagatgtacagtgggtttggtaagtgataggtgctataaaatcttttattttttaatttaatctttatttttggttgtggcaaacacataaaacataaaatctgtagtcacaaccactttacagttcagtagtgttaagtatattcacattgttggtgcagcaaatctctggaacttctttaccttgcaaaacagaaacttgatgtcaatcaacactccccgtgttctgcatgctcccaccttttggcaaccattattactactttctgaacttggactactctaggtacctcacataagtagaatcatacactgtttgtctttttgtgactggtttatttcacgcagcataatgtccttaagattcatctatggtgtatgttgggggatggtgggggtgggagagccttagggaaaatagctaatacatactgggcttaatacctaggtgatgggttgataggtgcagcaaaccaccatggcacacgtttacctatgtaacacacctgcacatcctgcacatgtccctcggaactttaaaataaaacgattaaaaaaaccactttaatttaaaaaaagattcatctatattgtacaatgtgtccaaattttcttctttttaaagactgaatgacattttattgtatgccacattttgtttattcattcatctgtggatggacgattgggttgctttgaccttttggctattgtgagtaatgctgccatgaacatggctgtacaaagaactctttgagatcctgctttaaatttttttgaatatatacccagaagtagaattgctggatcatatggtaattctatttttaattttttgaggagccaccatactgttttccatagaggctgtatcatttgatattcccaccagcagtgcacaagggttctaatttcttcatatttttgccaccattgttatttttaattttttttatatttcatagtagccatcctaataggtgtgaagtgtaaaaattattttctaagactaaagaatgaagctattgagtgtcacttgcttatcttcaagcagtcaatgcttttttaaaataattcttcaaagcagactatatgttgaagtcagaagcttctgatgtgtgactttcagggactctgaaacaggtgttcatttggcaatagaaactgatgaaacattcaaaacaactttctctcccaaaccttaaaaagaaaaattgtgacattaaaaaaaatcacaaattgtttttttcttgtcagtaatgacttactggttcatgcagaggtgaatattggtaggtaaataatcccaggactgtatgctgagaatgaagctcagagcagacccttatcagagtgtctgtcttcggaaatacttgagtcaaggagctgtccagcaggagagaggggagttataaaggctttatttgcatgtatttgcaactctttgttgcagtgtaagtataagtgaagtgtttagtataagtgaagtgaagtgtgcttctgtgtatggggagggagagaagggaggagggtgagagcacttgttccttgtataagaaaaaaaatggctctatttacatcgtaactccccatgattagtgcatgaaggaaactatatattttctgaaggcaggctattttaagaggataaaaactgtgacatcatccaggagagctaaatatcagttgagcagctagtataagaggtatatgcaatgagttatgaggctctgaaactttccacgttagtttacgccctttgcggcatgatatgaagacttttgtgtagcctaagtgttggttttaatgaggtattgcaatgtacactcaaatgaaaaacacatgatataccccaggcaagagagaagcaataactgtacatatttttgaagaagactagtcataccacaggctaccattataacagaaaaaacaacaagaattttaatacagttgtctggccaaatatattaatttaaactgaatgccttttaaaaaatattatagctgtaaggcacaacgttccattggcaagcatcttcaaaaccttcattttagaggattgaaggaaaaagtgcaagcaggccttcccggcatgtacgtttggaagatccaccaaaaagtctttgatcatttatgtgaggcttctttgagtttgacacaaagaagctaaaataaaaataaatgaatttttaaaccagttgtcgtctttgtatttacataagagaatgactgagatgccttctggaattctatggtaagaacactgggttgtgcatcagaggtcagctggtgctttgctctgtctgtgtgttgacctgagttcaaataactgagacagattttcatttacctgtgacctcatttgggtgttagccctgggttctaataattcttgtgcaaataaagtaccgtatgttgtgtgttccttaatttagaaatctgaaatctcaaagtgctttacttcattttaattcaatagtgattttactgacttcctgcttcaaggaacacagaggtgaaaaagagctagtgccctcagatggcttattacaagtagatcatttttgaccaaatgtctctaaaatcggttgagaactgatacagcactgggaagcttgttgggtcaatggacataatttttattaagggatttcgttgtatttcttttgagtccacttcacgtataaatcaccgatgagaacatcagggtggcagttacttctactatccatagagatcattgaattgcaggtatgtggagttggaaggcagctgaaaatccatgtcagactttgatcagtgtcactaaagccccattctcttgaaaatattgcaaatgatggggatgatctctttttaccttgaacacatccagacctgtgattataatcagaaatcttagcttttggctgttctcattccagttccttaaagctccttctgacacaccagcctttcacatacggcaccttctttagaatcccctgccaagaatcaagtgtttccaaactagaattgctttagatgatgggataacacaaggtgtcaaggcttcttttagttttgtgaagtaactttcgtagtgacttcagaaatgattttccatcatttgaaatggaagcctacaatcacatttccccctaaccacagtcttccagctgttaactattgtgtcttgttatgtgggtgggtgggggtggggaatcggtatatattttccttgcaactcaaaagaatccagaaattagcaccctggactcacataacagtttatcttgttgaaacccccatgtgcccaattattattggttgtctgtttgctcctgtgagtaacggaatgagggtctcaccctttgttaccttggatcgtctggctgagaactgaactttcttgttcttattctctttgtgatctactattattctggaagcagccaaggaaatactgaatcttgatttatacaccaacacaatttgactttgttttgagaggcaaaatataataatatttttctttcttctgtcagttttatttttttcttgaaatgaaccaaattgtctacacaattgcctcagttgaaagaaagactctgtgaagcttttcctggcctgggttctgtgtaacgcactgcacttgggttctgtctgaatttgactcctggagctcgccaagccctgatgtgtaattggaaacatgcacactcactcacagcagcgcttgactctgcagaatgctgcggacatttttcccatctttgttcattcttattttgtccctgtgccatgattttttaaattgaattcaaatttgcagcttctaaaagaaaaccacaagaacatgatttttaatctcttgagatttgcttgccgctgttctacatataaaatagcaatttccttaatatatctaagccagatttatgaaacaattaaaaatggcatcttatttttttttaaagtcttttaccagttaaggaagagcgtgtactaccaaagcaaaacaggttttgcctctggcgagtctgagaagtaggaatggctatttacacagacccttcttcaaagtgtgaaggagggctcaaacactgtaaatggtgattttagccttcagccagattccaaacttggaaggaaagaaaagtcctcacaaaaccatgtcgcctcatgtgaagtgatgtcatcatgttggggagaggttacctagagaagatgaagcatcttacagattactttatttgtgagctgtttctgattattccaatggagggaaggtcactttgaataatgacgccttgtcattccttctgtggggaatctacactactagtcaccagatgtgctgggtcaggcacttcaggcttcctgaccataagctccacgtgttcaggtcccctttgtgtgtgtgcccttgctggaggaaggccaacctgaagcctgctctccctgcccaccaccccaattaaggaaagctgtggtttgtgatgatttatcatcaatatctgtgtctacaggcccagtcatcttctccgagtatgaaggtttggcctgactgtagttcagcagcttcccatgtagaactttattcgtccttttgagctaactattaaatactattgagccttttctgaaatgggaattttcctctttagacatcattacaaaatcctgtgactcgacgggactttgaagatcagttgctcttgcagatctttacattttcaacgttttaaagactcttaaaaggtataaaatgagtcctattgaaatcaaattcactatgtagcacaaacttgctcatcttgatagtaagtgagccttcatgtgttggaattttcaggaaatgaagatgtcgcctaatgatgtagatggtagattgagagggatttacagttattatacttgccaattctacaccgaattgaggactctcctgtgcagaattctgccagacagttttgagaccttttcttgactttcttcccctggagaaggctttctggcctctctgtaaagttcacccaatggtcttagatccaccctctgcaacttactagaaccataggaataagtaaatccctttttcaaatggaacctttcaactatttgaagagaacacaatcatgcctcccttcaaacctcattcttgctggacgcagtggctcacttctgcaatcccggcactttgggaggccgaggcgggtggatcacttgaggtcaggagtttgaggacagcctggccaacacgatgaaaccctctctctactaaaaatgcaaaaattagctgggcatggtggtgtgcgcctatagtctcagctactcaggaggcaaaggtgggagaatcacttgaatacaggaggcggaggttgcagtgagctgagttcgcaccattgcactccagctcaggcaacagagcaagactctgtctcaaaaacaaaaacaaaactaaaaaaccaaaagtcctcgtgtcttctgttccaggacaagtccccagtttcctcaattgttctttcccatggtttttgtttatttttatttttgagacggagtttcgctcttgtcacccaggctggagtgcaatggcgtgatctcggttcactgcaacttctgcctcctgggttcaagtgattctcctacctcagcctcctgagtagctggaactacaggtgcccaccaccatgcctggctaatattttgtatttttaatacagacggggtaacaccacgttggccaggctggtctcaaactcctgacctcaggtgatcggcctgcctcagcctcccaaagtgctgggattacaggcatgagccaccgcgcctggccagccatgtgtatcttaatggaaaaaataaagacacaaatcagaacattagatattttattctaatttgatactctgttgagcctcctataggtaacgtggcttctctctaagaaaataactcatcactgctccccaaggctactccttccctagcattacccatcttagtattaataataggataaccatttactcaggggtttgtttaagcccaaatgcctagcatcattctttaatcctctttccctcatagccatccaccaacaagttctgtaggctccctcttcaaaatagatcccagtgtccagttctccacctcacttcctccaccaccagcaccttaattcacatcactagctcattctcctggagactgaagtcacccctccctcatctccctgcctctcctcttggcttcctatagactgttctccacacagaagtcagagtgttttcctcaaagtacagatcagatgagatttatgccctgctaaacaccacctcatacttccctcggcaatgtggataaaatccaagctcctgttcatgttgccaaggcccttcaagatctcacctgcctccagcaccactggctcactctgctgtggccacactggcttcttggtggttctagaatattccttattcatttctacctcagggcccgtgtgctccctgctcctgtaatataatttaaaaggttgacaatgacatcctcatttaatttctacctgaatcattgctgtgaattttatattggaaatgcagacatagtatctttttaaaaaattaatagaccattctattattaatgctaatattgtggttctctcaatgaagcttaaaaaactggctaaatcttgccagaaaggatatttaaatattaattataccaaattttaataaatagttatgtttacaaaagtttgctatgggccgggcgcggtggctcacgcctgtaatcccagcactttgggaggccgaggcgggtggatcatgaggtcaggagatcgagaccatcctggctaacaaggtgaaaccccgtctctactaaaaatacaaaaaaattagccgggcgtagtggcgggtgcctgtagtcccagctacttgggaggctgaggcaggagaatggcgtgaacccgggaggcggagcttgcagtgagccgagatcccgccactgcactccagcctgggcgacagagcgagactccgtctcaaaaaaaaaaaaaaaaaaaaaaaaaaaaaaaagtttgctatggcttcctaatgtataatactaaacaacctaatatgggttgaatcgtgtcagtaattgtgaagttctaatccaggttcaagtgattctcctgagtagctggaactacaggtgcccaccaccatgcctggctaatgttttgtatttagctggtccctcaaaatgtgaccttatttggaaatagggttattgcagatgtagtagggtgggcccctaatccagtgcttggtgtccttatgagaagaggaaatttggagacagacaggtatatgaggagaaggccatgtgaacgcaaaagcagagattgggatgatgcttctataagccaaggaacaccaaagactgcagcagcccccagaagctgggggagagagagcctagaacagatcctccctcacagcctcaaaaggaaccagccctgctgacaccttgatcttggactttcgacctcagagctgtgagaaaatacatttcggtggcggaagccgcccagggtgtggcactttgttatggcacccctgggaaacgcatacaatcttatcagaccaaactcacggaacaatctgagatccacagttgtgcctaaatcattgctgttttgaagacagccacatacagtcacatgttatcattgtcacgttagggttttaaccagggtagttgttcagtaacctctggcttcaaagcttctcagggcaaggccactcatacaattttgggttgccctttgctgtttaacaggtcctgctctcctggagaattccagctttttctttggcctccgtgtaagagagttggggggtggggctccatgcctgaggatcagaggcagaaaactgcaatcaacgcctcctcttcagacccttcctggtggtcacagccctgttcatcatcagctgcggtcaaaactctggctgagaaattgatccgctcaggaatcattcagggattatttaacccgtcattcctcagcgttcactaagcattctctctgtcctcagccagcaggaagttaccaaccacagggttttaaaaacacagattcctggtccacctcagagattctgattccacaggtccaggacgtagcacatacgtttccatttccaagcccccagctgcagctgaggctgctggtctgagaccacacttggaatagcgctggccttcaaggactagaacacattcttgccgcactccatgtcgaatcttcttctcactgtttcagtctaatattatgcccttgaatttcaccaagggctagtgtgggataggccatgtttgcagtgcctgattgttttagagaggtcagagaggtcatctcagagacttcactcattatggtgctcagtatgcgtcgtggaaaattactctcagatctgaggatgcagacgtattcagtcccttcttaggaattggtgaacatcttagtagatggtgaaagttctggaagtcatcatctttctcccattacttgcagaactgggatttttcttaattgctacagcgtttcttagacagaattctcaacatagttttttcagttcttaatataatttcctccttttgctgcttgattttgtactttcgtatgttctaataataccttcataccggtgtattttattcattttattttaaacggtaacatttttattataacgttaatccaggtggacattttagtaaatagagttagtacaaagaaaattaaaaccttcctgaccctcctcactcagaaataacatctatggacattttgggggattagccttctagttaatatatgcatgtattttaattaaattatgtgcatttatatataaatctttaagtttacttgaaaattagaatgaagataattttgctaaaattaaagacatcttactcacagttttattcattgccatatgtgtttatcagttaaatcatgagtatcgttctctatcatgatgcagtccgctgtgacatagtgtagactacaatatagtcttacagtcctgctctgactcttttaggtagtttccagttgttactacttcagacaaaattatgattaatattatagcagatacatttaattgatttagtataaaattatagaaacggactacttaggggagagagggagaggtgcaaattagagtttacatttttatcctaatccctactggatttgagttcctgtttctaaagaatttagtccactcatggattatttactccttgatgggcaatccctgtccttcagccatacccgagaaggacagagcatccctcatcctccagtggtcctcagtgcttccctcacacacagcacctgcacatgtaacagaccacgccatcacatttcttagtccctctcttcttcaaggcctcctttacaatatcatgtctttgagttcatactccccataaaggagttattcttccccaacaatagtcagaaaaagtattattattattttttttaaacggattcttaatggaccactgttaatcgtattgccttaaagaaaaacaagcttaatgttttgttcagagctctcattggcccatttggctttcagtccgtctctgcatttccacagacccacatctccaccgaaggtgtggttggtagaaggactggcaaagactttgcgacttgggcttgctttcttcctcttttctgcacattgcagtaacttggcaggagatgtctagaggttggtgctcccacagatatgcaggtgcctctcctcccccataaaaagctgacgtggttgaagtcacgtaacagcatttaggaggtaacgtgagcaggatctcgcaggaaggttgggtgggggatgaggtagagaaatgactcacaagcaactctgtgtcttggctcggtaactgagagagtggaagaagtgttggagggaaagcactgaggctcaggagagctttgcgcgtgcttctggtcatgtgctctgagagcatctggaagagatgtctggcaggcttttggatgtacaggtccgaatccagaagagggttaaagcttgagtgactgtggaaggcatcgtctgttagaggcaggaaagagcatgggcattaacatggcctttcatggagaacatgggcagggatacagaacccgagagagggtgaatgccaaaaagaggtggcaggaggggcgcggggaagatgtgaggggtgtcagctacaccacgtgtgatcttcacaccacaccagtagggaggggcttgagaatcctgttaggttgactctgctcatttccttggattatctgaaataaatttctcttttagttttaaaaattaattttcttgtctctttctgtagtcacaaatgatcttaattctgcatctacccctactctttccaatagttgcttgatgtggaagcagcacccgcttctaagatggactctcaatttgcgactgttggtctctttgtttggaattaacatgagctcttgtgttttgcccacttttgtgtttgctttaggaagtatttcaaacagagaaggctggagaattctctttcaagagcatttcagaagttatttgctcaccaatgctcaggatgaactgggtgatctctgcttacaggcttttaaacatttccagaataaaggacactgttactgtttctggctctaaaaatccttggatttctttctttctttctttttttaaacagttaaccactttctgtctttttcaccccagtaaagaaaatctaatatcttatcactgctcctgtctcttggagttttaaattacagaatgtttaattaccaaaggtccttttgcttattatattttaaacatgcaatgatgtttccaaaaatactctaaattgaagcagggaaagtcagcaacagctttattcaggtttcattggtgaacagctactggtttggatgtctgaggctgagtaatttcagtgcagatagataatttagctttatgatgattctgttgactaatagtccgaaaagatcagaaaagagtcacatataggaagatgttgactttttccacagtgagccatggttgcataacgattcctagtccagtggtcaacaagttgctgccactttgtgacagatttgaatttattctttgtttatagaaattcaagccagaaaggctcatagtgttggcagctgattaaagcaatttaagtttgatttttgacactgtaattaaatgtgagctcaagtcaaatagtgcattccataccccttccaggtgggcagggctctggagctggcagtgtgtcactgtctagcttgggtttggtctcagggattccaaagaaagctttgatttgtaaatgggtgggttgaagggtgccttccaaaatatatcttttagaggtatgaactaacaaaataaatgcaagaaaattggattaattttaataattctgctgctttgattccaaatccttgaacacctacaaaaacaaagtgtctcttaaatcgcagtcttgcctttggatcccggaactctctgtttctgtttatgagcaggaagagccagacatgtattctgagatggatggagacatacggaggagagtggaggcacctgagaagcccattcagggtaccgatgggccatcactgggcttttgcagccttcagaatgaattcctttcaaattatgttttcgaaaccagatccaggttctttctgttagtgattgttttcatatgaaataacattgaaatccagtagcaaattgggctagatgtagatgagaattccgtgtgggtaactggggttttacggagaattacaataatgagtggggtgaaactcagatattgaacattcatcaggggtgggagcttagagaagtagatcagggtgaccaccggcttcctggccaaagagatttttgtccaaccctggcccccgcctcttactcactgactttggataaaggattgagtctgttttttctaaatatttttcggggagatgttggtgatgaatactcattggaatcctcatttggaaaatggacttggtgttatataagatatatcagcaagaatgttactttctggattctacaaaaagttacaggaataacaaaatagatggcttatttgtgatagacaaccaactatttgatggttcatttaaaaaagtcgaaagctcaggcaggggctacttagaaaacacaggcaggatagaaacattaacccacgttatttttagtgtgccctttttgctacctaagtgtgttttttaagaatgatagggcatatttcagagagcaaacctggaagcattcaatccaatggcatttaataaaatgattttgactagaaaactggcctcacccagacacaatgcctcctttgagaaaccatttttcagagtctgagttgctcccactttgagaagtaactaccctagtccatatggaacaatgcatttcttccccaaacatattttatgtccaagagaaataatttcgtacagcttatacctactttgtttttgttattctgtctccatcatatggtatttaaaaagattgtcagagcaacgtcgttgttcagctttctactgaaaattcacatgagagtaacaactctgtctttggaactggcttgaaaaattctgaagtaaacaagaatttgctttttccttttatctaatctgaaattgatttatgagacaggacctctactgaactgtgttaaataccttggaaatattttgaaccaaactttcatactgtcataggaacagcagaaatatatttgcttgattaaaataaaatatttagatatgcttgatctactacactgtaagttgattaaaaatagttaaagtgttttaaccttgctaggaaagcagttatggcaatatccattttatgactttcaaatagcttttattgattataactttacacaatcatttgtcatattgcaaataaaagaatatggttaatatatggatttttaatttatggtatcctcttcttgcaataccaatataatcaatcttttcaaatgttagtaaatcaagatagaatcttttattagtaaatttatagatatgataagaaaaaggaacaaaaatgcatattttataaagaccattatttcagaagtaaatctttttttttacatttgagaaaaagtacaaatctcattttatatcttgtaatttaagtagccagatcttgtcaaaacttatatatgaaacagcttacttacagcatttcttaaaagcaatttatttttcctgggggcttactcataggaaggggaccacttacgaaaaattattgatgctactttaggtttagattaaagcaactctttctataatagaaaattctcaatttttgtatgatacagcttgtagttattgtatatgacatcagttataacccttcatactgagaactttagctgatgggaggaataattataaaatttaccaagagatatctgaatttcattcatatcatgtttttaatgtgcaagccataagttgcaaatttttggtgaagaatttcacaactaagagtgtctgaatctgcaaatgtacccaagacaccctttaatacttatctgatcaaacttacggtgatcttaattgctaagttaagtccattcagttagagttgcaagtagtatagttcctgtctcctcaggggagctttgtcaccattgtgtctaagttggcctgaaaatttctttagctgattactattttagtttccaaacttccacacttgaattatgtttttttgcaagcaaattcaatgaacttcacttgtaccaggttcctctctcattttattcacctggtgatgaaccgattatatttgtatggaggctatttttcccaatcaccctgaatattgttctaaatttaagctctatgcttctctctttgctttcatgagcttcttttgtcctagagtaacccccacattttttggaggtggcgtcacatagtgttttagatgtgaaataaggagttagaaagactttggtctgaggtctgtttgcttgctgtgactgtgggcaagagacgtaacttctctgtgcctgcctacctttagctataaaatgcagctaataatcgacatatctagtaaggttttgtgataactggaccagggcttggctccgtgtgtagtagccgcactttgagatgctgaatgttgcttgagaaaatgaagggaactgtgtggctggtcttactttaagttgtgtccatgaatctctgatgcacactcactgaagcccggaaatcctcctcctcgactctgtgctgtcggctggctcttctgtccctgctgggcttctaagtgatgggcaggctgaaggttcagctttaatcttggcttttatttgttatctcacttctccccactaagaaatgagatccaatcacatggcttaaaaaccatctataaactggtgattcccagtctcgaatcctgatatatccagctcccaactgatatctcaacatgtatatctatgagcacgtctgatataaagtacaaatcccgatctgctctccccaatcttgtattcttcaagtcttcttctctgtaaagtaaaaacactattttcgcagttgttaagccttaacattacacaacaaccacaaaccacagatcatctctgattgttcttttttcgtgctctctgcctccagtcaatcaccagtcctgataggtcttcctgcagaaactcctggaatgagtcacccgtcccctagaatgatgcggtagcgtcttagcttggttatcccagctttcctttgtgcatgttgacaaaccttttctgtacacaaaaccttcagaacgtgtcaaggagatcagacaatccctaattcatctttggccccaatggcttcccgccatgtttgggattaagttcaaactcctcagtaggatctggctcttgcccacctcatggacacagatgagattgttcagccctggcttgtgtctgttcctcggatgcccctgaacttgtgagttcaaaatcaaaaaggatatttgaggagctgatccttcagtctagagggctacttctctggatctttaagtagctggttcctatttgttgtgcaggttctaatttgatgccacttctcagtgaaggccatcccctccagctcctggctcttcccaagggacaagaagggtcttgggaagaactcctgatgcttcatatctaagctctgtgttccttccttgcagtgaattgatagatgactgcaaggcaaggttatcccttctcccccgtttcatctgcctccttgcaaaagtatttcacacgtgaaaagttttgacctgctaactgaggagaaaagtaaccctggaagttttttttgtttttgttgtgtgtgtgtgtatgtgtgtgtgtctgtatgtgtgtgtgtgtggtgacatggggatatcatacaaacagtattttatacaaaatgctttcagtgtccaagctgagtttcccttgtttggaagcatatcagatggcaaagggcttctcaactgcatctttctccctgcttctacatgtgtggttagggtctcagtcctaatctagttgtgcagccagatatagcatttaactgagagaataatactgcagtggacattcttgtaggtgacttctggtgcacatatacacacatctctattgtacatgtattaaatagtggaattacacagtctttgatgacagtagatgtgccgactttctttgtttacttctctaattcattctccatccttctctgctcctcttgtcctgggagtttgacttctgtcgactacatcaaatgggctcctttgtcctctatcttctgttgggttaagcaaatgagagtcaccacaaggaagcctgagagtaggaggagagagcttggggagtttttttctccagctttctctctttggtcatgggttggcagtgactttttccctccatggaaggccacagctcctattgtttatcctctcctgtgttcacagctaccggtgctgcgtgactgctacctcccttgcccttgtaggcctgagggtagtaatggcttcctgttcttgctagcctgggggacttcctcaccctttggtttttactaaattctacctttaccgttgtaaattctttcattaaattttgttcacttacctatttgaatatgctatatgcctcttattacagccctgatggataaataaggatgttttttaaactccagctgtgtgtgagagttcttattgctccacatcttcaccaacattgttagtctttgttttagacattctgatgtatctgtggtgttatttcattcaggttttaatttgtacttcctgctttactaatgaagtagaagaccttttaatgagcagttggatatcctcttttatgactgcctgtgcagtttcttccctgtttttccttgtgtgtattctgacttgtgtgtattcttattgattgatgggggttctttacatattctggatatgaatagtagattagatgtgttaaagatatcatcttccactccatgcattgccttttgattctcttaatagtgtcttttgatgaaaatttaagttcctaatttttttcttattttaatgcagttcaatttattagtctttcctttactcttagtgtttctgtgccttgtttttaaaatctttcccttcccaagtcaggaatatagttttctatattatgttccagaaacttcatagtttttgcttgtcatatttagatttatagtttatctgacatcaatttttgtgatgttatgagttacttctcaagtttctgtttctcatgtggatttctcattttccagcatcatttaccaacagtttctcccttttttaactactctgcccctttgtaaaaaaaaatcaactgccaccttcgtcaaaaatcaagtgtgtccatatatgtgtgaatctgtttctgaactttcctttcttttccattgtctgatttgtttctacctgcatgaacactattctgacctaattgctgtgcctttataaaaatgtttagtagagcaggttgtcctacctcactcttttttttaagatttgccttttaaaaatggatactataaatagatagatagatagatagatagatagatagatagatagatagatagatagatacacacacacacatagttatggggtacatgtgatagtttgttacatgcatagaatgtgtaatgatcaagtcagggttttggggtgtctgtcaccttgggtatttctcatttctatgtgtcaggaacattgcaagtcctcttttctagctgatttgaactatacaatacatttttgttaagtatagtcagctactctgctatacaacatcagaacttattccttctatctaactgtatgtttgtacccattatccaaactctcttcctctccactcccactctctgctcagcctctggtaaccatcattccactctctatctccatgacattaacatttttagctcccacataggagtgagaacatgtggtatttgtcctttgtgcttggcttattttacttgacataatgacctccggttccatccatgttgctgcaagtgacatgatttccttatttttatggccaaatagtattccattgtgtatatgtaccacattttgtttaccatttcatctgtggatggacatttaggttgatttcatgtctttgctatggtaaatagtgctgcggtaaacatgtgggtgcaagtatctttttgatatactgatttctttttcattagataaatacccagtagtgagatatctggattatattgagtcttatttttagttttttgagaaatctctactgttttctatagtggctgtactaatttacattcccactcacagtgtagaagagttcccttttctctgcattctggccagcatctgttattttttgtctttttaataattgccattctaactaaggtatgatgatatctcattgtggttttgatttgcatttccctgatgattagtgatattgagtattttttttcatatgcttgatggccattcctgtgtcttcttttgagaaatgtctattgacgttctttgcccactttgtaaaagttttctttttaattgttgagttgtttgagttttgtgtatattctggattttctcttactagatgaacagtttacaaatattttatcccattcaacaggttgtctcttcactctgctggttgttttctttcctttgctgtgcagaagtgttttagtttaatatagtctcatttgtctgttttctcttgcctgtgcttttgaggtcttagccatcaaatctttgcttagatcaatgtcctgaaatgttttctctattttcttttaatagttttataatttggggtcttaagtttaagtctttcatctaccttgagttgatttttatatatggcaagagatagaggtccagttttattctttcgcatatggatatccaattattccagcaccatttattgaagagggtgtctttttcccaatgtatgttactgatgcctttgttgaaagtcggttggctgtgaatatgtggatttatttctgggttatcaattctgttccattggtctatgcgtctgtttttatactagtatcatgctcttttggttactagagccttgtaatatattttgaagtcaggttatgtgatgctcccagttttgttgtttttgttcagggttcctttagctattcaggctcctttttgctttcatataaattttaggattgtttttttctattcttgtgaaaaatgacgttaatattttaacagggattgcattgaatctgtagatttatttgggtggtgtggtcattttaatgatattagttcttctgatccatgaccatgcagtgtcttttcatttgtttgtgtccttttccatttctttcattagtgttttgtagtttttttgtagagatttttcgcttccttggttaatttttttcctagatattttttccttatacctattgtaaatgggattttcttcttgatttctttctcagccagtgcattattgggtatataaatgctactgatttttttgtatcctgcaactttactgaattttttaattaaacctaagagttttttggtggagtctgtaggtttttctagatgtaagatcatgtcatctccaaagagggacaatttgacttcttttccagtttggatgacctttattgctttctcttgcctgattgctctggctaagacttccagtcctatattgaatagaagtgataaaaatgagaatccttgtcttgttccagttcttagaggagagactttccgcctttccccgttcagtataatgttagctgtgggttaatcatgtatggactttaatatattgaggtatgtttcttctgtacctagtttgttgagagcttttactatgaaacaatgttaagttttatcagatgccttttctgcatttattgatatgatcatatggtttttgtttttttctattgatgtgatgtatcatatttattgatttgtgtatgttgaaccatccttgcatctctgggatacatcccacttgaccatggtgcattatctttttgatgtgctgttggtttcaggctactaatattttgttgatagcttttgctgaacaaaatactagaaaacttatattcaccagaaatattggcctgtatccatgctgaactgaagtgatgttcatcaggaatatcagcctgtagttttcttttttgttgtgttcttgtctgattttgttatgagggtaatgttggcctcatagaatgaattaggaagaattctctcctctttaattttttgaaatggcttggtgaggattggtattagttcttctttctaagtttggtagaattagtagtgaaaccatctggtccttgacttttctttgttgggagattttttttcctatccaatcttattacttgttattggtctgtttaagttttcagtttctttctgattcaatcttggcaggttgtatgtgttcagaaatgtatccatttcctctaggttttccagtttgtaatagtctctgataatcttttgtatttctcactcttctttaagagcatcttgtctgtttttgactctgcatttccatacatattttagaatcactcaagtttcacaaaaactttgttgaaatattgaatgcatctgcattgaatctattgatcaatttgaagaaaattctacctttgattattaagtttttcaatccatgaatatatctatccatttattttggtcttcttttaataatattttgtagtttttggtgtagaggttctgcacgtattatgttagatttatgtccatattgtaaggtatttttaatgctaatgaaaacagtatcacttaaaaattttgatttctattgatgtttatgctgatatataaaactaaaattctatattgaccttgtatctagcaaacttttaaaactcatttattaattctaatgacttatttccaaattctcttggaaattctgtgtaaaaaaatgatgtcatctgtaaataaagttttatttactttttcccaatcctttaacattgcatttcatttccttgccttctttactaactaagactgccaattcaatttcagacaaatgcggtaatatgtggggcttctttgtcttttcccccaacttcaaatgattaaattttaaagttttgacatgaaaatgtgtggtttactgtaggtttcggtagattccttttatcaatttgtaggatttataaacttcctctttatttctaatttactaagaatttttaatatgaatgttgaatgttattaagtgcttttcttcttttgtttaaagttatataaattttctttacaatgtaaatttgattatttgattgaaacaagctttcattcttaaaataaatccagtttgttcacaatatatattattgtcgtatatactgttgggttttgttttctagaattttatttaggattttgcatctatgtttatgtatgaaattgacccataattttcctttttaaataattttctagctacattttggtatcaagctttcttttcttttatctgaaaagcttatgtaagagtggcatccttttttttttaaatgcatgttagaatttgctgataaatccgtctggcctggaactttctttcttttttttatttttttatttttggagttgtcctttaagaggtctgagatttttcaatcaatgtctttaataattataggagttcaggttttgtgttttttcttttgacagttttggtaaattatattttccaattatgtatttcaactaatttttcacatttattgataggaaattgatcataatattctattatccttccaatgtctacagcatctgtagtaatagccccctttttattgttgactttggttattttaaccttccctcttttctctctgtaatcaccagtgacttacacataactaatcttttcagagaaccagatttggttttgtttatcttctctaccatattatttacaattttctcaattttgttctcatttgttatttttcttcttctttctttgggtttttctaactttttgagattgatgcctttgcctctttcctatggaagctcacccacagaaacagtaacattattatgtgctccacttcatatttactcttctgttttatttgcagaaccaagccttgttcaagttagtattaaaatataaatgactcccacagccatctctttatgcagtgccataaaatgtgctctaatcagaaggattttatattacgtgtttttaattattcttgtgaatcctcaatgcccaaaatgaattggcaacaaatatttgtctgtagatgtcaagatatttcctcatactgatatacttctcagcataacctcccatttagtttctttgctccttgctcctttcatgctgaaacaaatcctttacccaatttcccctacaatctgaatattccctgtttttggggaactcaactcaaatttcttttgtcctagtttctttttttttaacaagtttcacttgttatcttactaacagtgtatttaataaagtcgatgctcaataaatactcttgtctcaatgaataagcttcaacctctttgtagctatattaatatatttatgtattctataaagtctaattggtagcctattattattatttttttttttgagacggagtcttactctgttgtcaggctcgagtgcagtggcatgatcttggctcacggcaccctccgactccctggttcaagcgattctcctgcctcagcctcctgagtagctgggattacaggcacacgccaccatgcccagctaatttttgtatttttagtagagacagggtttcaccatgttgcccagggtggtctcaatctcctgacctcatgatccgcctgcctcggcctcccaaagtgctgggattacaggcgtgagccactgcgcctggcccgtaggttttaattaatatatttaaattttcttggcatttcagtatttctatattataatgtgaattattttaaaatactttatctgattacaaaggtagcacacacttgttttatcctaaattttctcaactgtttgacttgaaaagggggcagttactccatgatccaaacctcaaaactgaaatttgtattttaagatgttttctctgcatatgctaatatacatatgtgataattttctaaaacttattatactttgaatattttctatgcagtacattaatatctatctcattcttaatactgtgtagtataattattcaatatctgattgaaagacgtacagtgtattttcatattttactgttactgagcagtgtaatagcagacatcctttgtacttataactgtctattgtgagtatttctaaaaaatagatttctagaatatcaattgcggagacaaaggataaattattttattcccattatacacgaatgtcaatgctttttcctccacattcttgccaatacttcaaaatattacattttttcattgttgttatctggctaggcccaaatattgtgtggtggtttatttatttttattttctttaatctgttttcacttttcttggatggtttacacttatggatagtaaactcctgtgatggtgactcgtggtcatccaggttcttttgcattgtgtgggttaggatgggcaggacacactcttgtatatgtaccagctgttggtttatgtgattttttcaggtcaatctatcccatctgacaatataccttccattaggctgacagtctgtcatgcacacagtgcacacacacaattatattacaaggctgataaaaccgaattgctctgttccagtggttctcaactgggacagtttttggttgcacctttagggacagttggccatgtctaaagacagttttggttgtcataattggagtctgcgaggtgttactggcatctagtgggtagaggccaggaatgctagcaaacatcctgccatgcacagggcagcccccacaacagataattaaccaacccaaaatgttgatgctgccaaggttgagaaaccctgtggtctattgctgtgacattttagtgcttctgttgtatcacaagtgtaccaatttgtgttaattttaacacatttattcttgcttaaaaattgggatgtatcttaaaattgattgattagaaagtattacggtgaattttcattggcagaattgttttttctttcctagtgatactttaaatcatgatgtgctttacatcttaccacccaaagtcttagatttgaggaaatatgatatgattgtgtcttatcttttatccctacatatgtgcagtctaatttcagtgtaggaataggaagtctcgtgtagcatgacagtgtaattgctgtatttgtaggtattaaacatcaatcaatgcctagctttgtacccataggcattccactttgtgcctgctctaaggcaaaacacaatattcaatgctggaaataatttcatatttagttttatgttaaagtagttcctcttagatttagtaaatagacaaaatattgattgaatgttcaaatgtagggtggaatgattgatttattcatttgggaggttgtgaatcattcctatatctattgattttgttcttcatttatattcattacctttaaattcaggaaggttattgaaaattcagggggaaacatttgttaggttgctaactccttcacactaaaccttctatgttttcttacatttacaagcagtctaataatccagtgaatcccttacatactgaatgttgggaaaaggtcatgacaggaatatctagttttcaaatcttggtttgttaaagatcagaaatcttccttccagatcttggtttgttaaaggtgatgatcacctaaactaaagcatactcagatgatggctgcttgatataatggagtgagcttttattcctggctcttataggagaaaatctgtaagtggtcaggggaaaatcgatttcaatgtgtactgtcaattcctttttttgcatttgtaagtgagaaaaaaattaggtggttaaaaggtggcagttttgagttattaagaatgatatggattagcctcaacttccatgggtcactacgaggtagccgctgatacttcacatctggttttggtttgcagtaactgacaaagaagcacaaggtatgtatagccctattgttagtgtcgttccactcttttaaagacaaaaagctccccactccaaaagtactgaaatattttcaactccaatttacagattaggcaaaacctcttgagttaagggtcactaaaggcagctgaaaaatttctttgcaaacttctcagtgttctggctgttaaagaaaaatagtaaaataaaaagagctccccagtgtaagaattccatgaaacagagagtgacgtgtgagacgcattaatgctttccattcctgatgaaaagctcgaacagctttaagtaatgtggaatccagtatctcaaatcctagctccgtctgggaggtgagttttgggtgtcctagctccctgggattggaagagcaacacgttgtctataggcattccatatgtgagtttaattatgataacttgacttctttaaagaagctttttagatgtttggggagaatcccactcaggactgtggtttttctttctcctgctttctttggggaaggagcacacaggaccatggttcccagaaacggagacacactctgtgaacctgtgcacgtccctgtgcccacagcgaaggcccctccagtgatcagccaggcccaccattgcagccttccagatggctctcattagagtcaaaattgactgagggaagcccctggggcgtcctggaagccttagagaccatgctagggacagagcctctgatttctaggagctaatgtttcagagaaaataataacagcaccttctaaacactagagcttttctctttagtaactcaaggtaatgaatccccaccctctccctctgcttctcatttaccacccctatttctctgcaagtcacaaaggggaaaattgaagttttctcacatctccttgggaaagtaatctgaggttgatgggctgagatgtttccagagaatgggaatggggtgccaacagcatggaggagcctggggagctgctggtatcaggcatagagtgaagaccaaagttagggatgggagaggagggtatctactctcatggggcaaagtgaccctgaggcacctctacatttaatgagcctagaaagaaaaagggtggaaaagaataggaaggaactgttgatgttcccttcttatgtcctttctgttgggtcaaaatactgttgtaattttggcatatttttctctctatccaatatgcaagttgtttgtttggctgaatactgcttcacttcttttctgcacctccagtgaccgacaatgcttagcacataggcaatgccaatcaagattgatgaatggatgaatgatcatacagaaggaatattttctgctgtagcaacgttgcaaaagtttcttcttaaggaatcttctgatggtatgccgatgcccggttgctatataacaactcactgcaggactcagtggcttaaaatcacaatgatcactttattatttagaatctctcatggttccagggcttgattgggctgagatagatattatttgcttggagtctcttataggtttgcagtcaagtgccggttggggctggagtgatcttggtttcttcatttatacctctgggggttaatgctggctgtgggctgggactgatgactggaacacctacaaatggcctcgtcacatggcttgggctttctccccgtatggtggctgaggtttaagagtggctgttcccaagaaaatcaggtggaagctctatcacctttccaaggtagccttggaagccacatagctgaacttctgctgtagtcacagcccaactcagattcaaggagtgggaacgtggacctcactttctgatggaagcaaagtcaatgtcactttatagaaggttatgcatgatgggacatcctactgggccatcttgggaaatacagttgccatggtggtatggcaaatgtctagaaatgcaatcaatataccattctaatggtttctgataagtacgtgtgaaaccaacccagttgcctaaatagtttggctggaaataattttaatcagagttactttggaaaattacaaggactaagttgtatacaaatgggagctcttattttatattgaaatccagataaatctgctgtaaaataatcatgatgccagcaaaatagaggatgtatactcatccactcatccactcattcattcattcgttcttacagccggtattttttttttattgactatccacttgcttacaggtactattagctcaattattgagacggaaatcccataagatacagatttgggaggcttcttagagaaaatttaccttcctcactgcccaatgactcaatctaagaagacagcttaaaaaagccacttccacagctcacagggcctgcagctagacttgggagagaggtggtgacagtggggagaagaggggtggggagcagatgacctcctgctctgtctctctctctcatctgttcatagatatcgataccatccattgtgtgtctgtgtttgcctgtgtgtctgtgtgtatatatgtgtgtgcatgtgtgtatatgtgtgtttatatgtgtctgtctttgtgtgcatgtgtgtttgtgtgtctctgtgtgtgtgcatgtgtgtgtgtctgtgtgtctctgtgtgtgtgcatgtgcgtgtgtgtgagagagagtgatgggggagccactggttcctcacaacttaagtcccagctgtcatcttaactttgtggatggtcagcaggcagtttaaaaacaaatgaaggcactgatgctgggcacgttctgttcagaactgagggactggctggtgctttggccacagctgggcctggccacattcctaaagaggagccacagctggctggactgaatgaaactggctgggcctgtcccagttccctcctgtcaactgctgttgagagaacctcacccatcccaggggagtcccaagttcaagtcgaactctgggctcttgaagggctctcctggactagccactgacacagccagtattgctctcccctgatactcctgggctctgtggccggcttcattcattcattcattcattcattcactcattcagtaagtgcttgttgagggccatcactgacacagtcatgagggaatcctggggttcccctcccagtgtcagcactggggctccgggaagatggctgccttccatctccaatgcattttaatttcttctttgaacaaacctgcaaagttactggttgattgaaaaaggaatattggcacaaatgaattaaatgacgcatcggggtcaccgagcagttggggatgaagccaaggtccctgttatcaggatgctgcatggactcttcccttcggagaaatatcacgaaggctccccgcctccagcgcgcgccagtggacccctcctgtgaagcagaggttagccctgcactcagggtcctcagttcctacctaagccagctcatcattagcaattcgtattgtgcatgctggcaatgcagagcccaggggcgctttttgtcgagccagcgtcttttatctgcagttgcaccccagcgaagctgggaccggaatgtacgactgttacagggtccgggcctcctcccatctagtttgcaatgcctctcacatgcaaaggttatgtttgtttccttttaaaaatagcagacgagcaggtgacacactgccttaattatccttctgtagaacacattgaaaactagcctccctgttctactggcagagcgagaggaaaatgtatcctaaaccgcagtgggtgaagcctcttcagatgtcggtcagagccttacccacacccagccccgcccgacagccgtgaacacagacaaacaactgtcacccattgacctcacgattccttggtatatgaaccaaagtggaagcggcgagaaaaggaaatactgcagatatttttaagtagaagcaaaggcaggaagaggaaagttgcaaaattggttatatttctttttgcttaagtgcataatgtttggatgaccaaaaagtcagtgtaaatgtataataagattattttcaaggaaatctgtatattaagttttaaggcctattttacttcatatatacataaagtaccatttttagaagtgctatactccatgcatattccaaaatactacacgttttttttgagaaaggaagggaccgtgaggcttttttcacatctgatatattacagtataatccatattcctcctataacacttagttctggaaaaggatctactggtgtctgagtttaggcaggcactagcactgacgtcagtattgtgtacagagaaaacaaacatactctacatttaccgaatttgatgcaactcacatttgggaacatattgaacaatctaaaattattgtaaagtggtaaatttttcaggctttaaaatcattaacagtggcataaaacaattatacaatttccatggacaaatctcacccccccagatttatgcctttaatcttatattcagatctgtgtaattcatgtttgctcctaaaacgtgtatttctttatgttctataataatgaacaatccaaatttttcaaaaaaaaacaccatttctgcattataaatgttagatcttaattttaacaagtaaaaaatgagaccactttgtaaaataatgtcaattcaaggaatttaaatcaagaattaggcacactagtattctctctaaaggcctttttgaggggcatttagcaccctctagtgacaacaattcaagccgttcaaagggaacttccctgcacgactcatgtctggtttctagctggcaagtcaacaatgcagtgtagttctttaggcaggaggtggttgcttcctaaaatccttgaggcaggattatttttgtagctgtaaataaaggctggaataatctccaccaggcaaccgcgcagtgggaaaaccatgatttatccctatcggctataatattctttggcttatcatggccagtccactcagaaagaacatttctagtactccttgaacactgcagcctttcccaaaacatgtgctgagatctgtgtgggcatcagatgacaacaacaaatttactgatatcatcatttcagttcaggtcggtgcatttaacgggatttaacacattttcataagagtgaattggaaaagaactggcctgccttcacttcagctgcacctctgtgtcctctgcgttgcttgcagtgggagataatacagtgtggagagggtgaggtgtggagagggggcgagggatgaggagggctcaggtggagaggataccatgtggagcgtaccatgtagcagttactgcgctgagacagactcccagtgtcctgtgctcctgacttcaggcacgggtatagggcttcattgcatccgcaggtagcctggtgatactcatgcaaatataaatgaatttgtggcaaagattttttgccttcgcttcatttctgattccatttgtgatggaaataaattagtaaataaatcatcaaatgaggtgatgctgaattaaagcccacctcaaccgaaaactaaaagccaactttagaaagcagcaggaaaaattattaatgcaggcttctacatcaatttctatcaattgaatgctattatagtgccacttatgatctttctttaagaagtaatctgtattttctttaaaaataattcataaaatagtgacagattaagacaaaaataagtgatgctgtttagtatcttataggtgagattgacacacttcttaaaaaatcatttaaaactctgactagaatcaaaatcaaaattaatttcaacaacctgggataaattctcaatttggccaaggatggtgacaggggacagtacctgggaaaggatactttggatctgagtcgggggtagagtgggatgccagtcagatgcttttgtgaatcttaattatatgccctgtgggcatacgaagccttatgggcaccaatggcaacgtgatgtctgtagcatctatgctcagatatacccagttatacggacaaagaagttgaaactcatttaatggtttccaaattatatggagaagcctaataattggaacaatacatttaaaagttattttaagctaaataatggtgacaaaataattactctcctcttaggtttctttcttaaaaccacagataatacattgacctatttggagtccttgataatggttttaatattcctgcatttttaaagtcatatggagttgagtaagagcaaaattggcctaaacttgagaacgtgtgggatgcttatgaaattgtgtttattgaaatcattgctccatgggagcttatagaactgaactgacgtgtgcttcagtattaaggaaattgcaacttggtgttgagaagttgaggatttggtatgtgataacagtttccttggtttctattagttcagatcaaccaagagactgaagaatacattcaccacttagagaaagtgttgaaacaatggttatttaaattgtaattggattatttcttaatgtgctgctgggggatatggcactcccctacccccccacacacacaccctcatacacacactcacacactcatacacacatactcacatagttgtatccaatggagtgaagctgtaatcatgaagtatgctgtgaacagaaaaaccgtccttaaacagcgctgactgggtgcccttgagggctgagagtgtcttcatgccgcgtatgttctcaggcaaatcctccgactgctgcagatggaaaagttccatggagtgctggagttttccattgtgcggcagccccagatgcttgattcttatctacaatctcaggcatgttcctggcaaaaacccctgggacatcgttcttgcggggctctcatgaataatccaaacactatgcattttaaattcatgtgtcatcttaaggacaatatacagcacttttgtcctattgttttgtccttaaaaacctgcgtttcatgggtcgctcccaggctctgaagttttatgtgtgcagaatttgaggagactgagataggcttcccgaatgccgagacatgcggtgactggatagagccctgtaatcctggcttcctgagtgcccactggagttcctggcaggaaaaggccattaatatcacctgaatggattaatgccgcatagatggcctccacgaaactcttgagcgtttctgggttttcttaataaaatgaaaaaaaaaaagagctctatgcttgctgtagacatttaaaaaagaacaggcatttgggcatgctaaaaggtttgacacctacaagtattgtgggctgcactttttacagaacatgcctgtatttttcagatatttacaaaaatgaacaacattgcatgttacttacatatttttatattaggatataatttatgtttattacaaatttatgttttgaaaatataagtgaaccaaagaagaagaggggaaaaaacaaaaagcttctctgccattggtattataagatatagctgtcaatatttttactttgcctttttatttattttttattttttgactattacaaaaggttattggccgggcgtggtggctcacgcctgtaatcccagcactttgggaggctgaggcgagtggatcacaaggtcaagagatcgagaccatcctggccaacatggtgaaaacctgtctctactaaaaatacaaaaaattagccagggtggtggcgggcacctgtagtcccagctactcaggaggctgaggcaggagaatggcatgagcccaggaggcggagcttgcagtgagctgagatcacgccactgcactccagcctgggcgacagagtgagactcaaaaaaaaaaaaaaaaaaggttatttaacaaaaagtctaatatgaaaacatacatgacctaatttttacatatagtgaaacaggccctttggagaggggacatgggtttttctgttgaacagccattatttatactcattccaaagtttctaatatgatgatactatttccttgtattaccaccgttccaatactgttctgctgccaactagttgacatctccacacattcatctatgacaagattcataaagggatcgagtccccataatattccttggacatgtctgccaccattgcatttcatttttcaactcgggaaggttagcttcgctcatggtgtctattcctcaggttcacagatgctttggaacagaatgcacggccatccccaactgcctttttatttttaacaaaatgagtctatggatataattctcctatatactgtgattttttaactaaccaggtaaaatatcagagcagttttccatattgctaagtgttcatctacgacatcattttcctgcaatgtttttgaggaggaagggcgttccattgtagggatgtatagggcagggataaagacgtgaatgagtcatgagtgaatcttctgttgtgtccccacagatgtggaggttcagacggatctcctctctttgctctgcgcatgtattacattgagaaccatgtggctgtcattcagagtgttcttagctcctaaccttcctccccatattccatacagagaagttagtaagggaacaagaatgagaacttgttcgatctttagaaaatgggaagaaatgattttaggataaataaatactagtgtttcttttattgtgacagtgaatttatggtatatttatgttatattattttgtttctttctttggagtaaaatgtgaggagactagtggaaggttttggcagattcacaggggatgggtttgtggcagagaagcatgcaagggaaatgtgtgctttattcataggttctgctgtccacagctactgtatgggctgtgctggtctagtgtggtgattactgcatctcaaggagagtgaaaaaggaccctgccctgataggctcatggcaggacgggcctcaggtaggggccgtgtgccagattgccccctaacttggtccgcgtggtggcttggagggcatatttccctagggagaggaggtatcaggtgggaaaggcagcctggttcttaggctgctgggtggtgtagggatgaggccatttaataacatagacttggggtacaagtgaggaaagctagagtgatatctatatcttcagataatttccccataggataatatttgggaaacggtttctgcactgctatattctagttaatagatgtgccttggccgggcgtggtggttcacgtctttaatcccagcactttgggaggctgaggcgggtggatcatgaagtcaggagatcgagaccatcctggctaatatggtgaaaccccgtctctactaaaaatacaaaaaaaattagccaggtgtggtggcgggcgcctgcagtcccagctactcgggaggctgaggcaggagaatggcgtgaagctgggaggcggagcttgcagtgagccgagatcgcgccactgcactccagcctgggcgacagcaagattccgtcccaaaaaaaaaaaaaaaaaaaaaaaagatgtgccttgtcctatcaagagccaaagatttttttaaaacactttacattaaatagtcagagattaccaggcttggatgctatgatgccatttgaaacatcaagaattattctctttgaagacaacaggaatcaatcaaacattttgtcattagaaatgaggaggagtttcctttgtaaaattttggaacagaatttaccactcagtatccccaaattaactttttattagatcactttttatgtttgtatgcatttccaaaattagacgcagtaaaacttatggatcgaatattgatcaaataatagcatctgtttttctcttttttagtatccaataaataaatttgtctcttataaaacaatatttttattagttagaaaatgatggatatatgcatgcatgtatgttatacataaataaatatgggagagagagacagagattgagagagagagagcatgtgtgagagaaagcagagaaaatgatgtacattggcaccagtagacaatcagagttaaccaggcaaagggtattaggagtttggtgtattatcttgtggcttttctgtaagttggaaattatttcaaaatagagaggtaagaaatcccactcttcacagtttgatttgcattaggcaagaaccagggagttaaggccaaatcatcactgaagcattaggtcccagtagaaatgctgatctttcctgctgcagggaacaactgagggctggattagcaaccacgaggcgtgggtgaggcgggaccacacaggattttcttccgtggctatttcattagcaaagcgttcatcttatttaaagctggtgtttggtaaaggcataatcaggtgccatgtgttgtggaggccacagttaacattttacattgatgcttcttaggagagaacaaaaagcaaggacactcagggaagctgagagagcttttctcctccgcactccagaattctagtggaagctgcccagataaaacagctcaggactttgaaattttcggggaaacagaattttaatcagcctgccatcttattcattgttcagagatgaaaagagcggaaatcaacaccccctcataatgtaggtgctgagaacttaggttctgatttccacagaatgattttcttacaatatactctctttcttttcttttccttctttctttccctccctccctccctttctccttccttcctccctccttcctcccatcctccttcctttctctctctcttctgtccttcctttctccttctccattttttctcgccctcttccctccctcctcctcctcctctccttcctctccctttccccccttatctttctccttctcctccttcttttgtcctaacatgaggtgataaatcagaggtatataataaaagccagaatgacctgggctggtggacagaactctgacacatgccggcctaaagtctgagtgaaatccatttactgaacgtccagctctgcaaccaggaattgtcagatgactcaggatttagtctattgtgttcttggggtcgcctattgagaccacacctctttatgggtcctgcgttcctgtagctagattcaaagcaaaatgtttcttccaagcaatttcctgaaaatgagtaattaaagtcctgaaaccctctaaggaatgttcaggcctgcattcgctgtacttccttcgaggagaaaacagacctgtgaccctgaacttatagcttggattttagacatgtaatggggccctcacatggcatctctgggtagccaaaagttctatgaggatctgttgtctgcaacatggatgtctgtcagagtgagaccagctcactgatattccgggacatttgtagtcacttcagttatttgggttttaataaatacttgaaaacaagacttaggaaggtttatttttcctctttattttttgtgtttactgtaagcctagagtccttgcgttttcaacaactttgttgtagagcaaataaaaagtgcaggtatttggaaggagaaaatgaaactgttctggaacacttatatgaaatgttgaataaatataggttgttaaaaatcagccaggcaatggctgttactgaacatggccatctattaacatgaaataaactccacctgcaaagtttccttttaggagaaaggagctcaagtcctctgtcctagtaattctgcgaagaattgggctgcgaagggctgacacccagggcagtggggtgccctcaacgccttggctccaaggtgcttgcagcccgtgtgaagccatgcggagtcccatcacatctgcatcctgccttggtctcagtgcagtgtgtcacacggcggcacaccggtcacacctgctgtggcagtccccatcccaattgatgccttttctttttttaattaaaaaaaaaaaatctcctggctgcatatcatcaagaaaaacaacattgttttcagggtctcttatctctccactcccaaatatcctgtttctttgggctggacagccaggaccaatagaaacctcttcctgccattggctgacttcatttcccagacttagcacaatctcatccgctctaaacaacctcatcaaaactactttctggtcagagagaagcaataattattattaacatttattaacgatcaataaacttgatcgcattatggccagcactattaaggtaaggaaagggttccttttaatttgacaaaatcttgttcttgttactcttttctttggtttcctttatcaaggcagataagttagggttgggcaacacccccactgccacaatagaggacaacaagatttcctttgcactgcctagtaaatttcctttttcctactccaaccatccgcaaggcttaaaaacttcaaactcagaaaaaaattggggtttctaaattcactgttgagtgctgtggattacttttggaaaggcttttcggagcgcttctgaattttcagattctctaactatccctaacggtgcctggatgtgtgtctgagaaaaggcagcagactcggagaggttgaagggtcgggtcaaagcaaaagatgcgtttgtgaatgtcagacatttggaggctcttcagtggctccttagcatcagggatgccaggcagtcccagtggaagcgaagagatactcggcaagtggctgctggtaatgggacgcaaatgttgacttgatttgtgggacatccacgctgagaactgagtgctcacgtaactcaaatgggggtaatttggtttgttccactatatgtttatcttcaataaaatacctactgtctgtgcactgtgagtaagatttcttccagcaatggttaggtttgcggagattggaaagcaatggccggtcggttctctgtgctgtggggtgtttggtctgatgcatttccttgcctaagtttttagtagatagcatgtagagattaatgtggaggtaaatctgcacaggtacaatcctaaatatggcctgattcctggaaatgaagccaatttaatggtgactacaagtcaaggggcatgcagtcttgaatgggggtccgttcagttgttttaaaggccaccatgccttcgtgacatttgtagaaatgtgaaaaatcagcaacaaaagcagatgctgagtggagggaaaagaaaattgtgtttgttgcatgtctttagttttgctgcacggaggtgagaagcatttggtggtgttttcataaggcttttagtttgttggaaagtgcataagaaaatggaagtttgcccagaattgggccaagccattttcaaaaatactctttggtttggtattttcataatttgaaatgtttgtattagaagatttgactcatatgtaccatagaaactgtgtttgagaagttcagcttttatttctcaaggtgtgttcaataatatattaaaaatctgtgtaccaagaactttcaccttatacttttctttctttggcttcaaggattggaatctgctgaaatatggctcctatagacaggaattataaaattgagagttaatgtgccctacttatagctacatgaatagaaattacttgattttgtgacccaaaatgttatttttttgttcttattttcatccttattcatatgcatgttaaatcaaatattctgtgtaaatcttgaatagcttgggtacgatcttatgtggttttttttcccaaaaaactcagtgcattaaaaaggacattgaaataacagaccatcctttagaaggtaggtacattttgcaaaacatccaaatgtgttatactgtttaatttgaagtatacatttatgaatacatgaagctattttgaaagtttgaatattttgtgattttctgaacacttttttggaaataatagtttacacttgtctaaggtactatgcttgatttaacattttattacattgcattatgtgtttattgtatgtacccaagtgaacccttagaatgactacaggtgaatttttttttaatcttctgttaaaataggccctctttataggtgacttcctttaagacatgtttctgttagatttcctgggtaaagtaatgagatgattttacagccttgtttatagagtggaaaaaggaggtcctgagtctgttgactacagtttcaattacgttagcgcaaagcccaagttagcatagggaaaatgatggctgtccactggaattaggaaacagccccccatagaggcaatttccagtctcaatgcactctgtttttttgttgtttcagtaaataaatcaattagtcgattaggtatcagatgctctgaattttttaagttggttttctgcatttgagtggagtttttatttttttgcattaacatttgtaagaccctatgagacactatgaaaagctaaatattcgtatccagtctttgtgattcttaccatcattttcccttggtaacttgaaattgggaacaaaatgtttcaattggaagaagtaaaggaattttgggaacttatgtgagagtgttcatttatctctaagtgtctgtgaattttaagatcagcttaagagttctagtaaagacttggaagcaacaaagctgatggtttgcagacaattcactgattggttttggtgcttcccttgggcattggtgacatctgacaatattgagaggtgctgaacctcaccggccccactgtccccacaaacatctcagtgtttgctacagactgcagggatcctgctgttgcactgaaaactcgattgtgcttcagttaggagttttagcctaatttcccaaagactttcctgattcctttttttttaatgccatctgcaatttgggaagtctagtgaagcctacagtcctttctcagaataatactttctggtgcctaaaaagaaatacatagaattacaacagaaatacagtcctctccccggaccttttaaggagaacatgaaccccaggttgcaagttctgatcctagaaagatacttaatgtgtaaaaagggaatgtgggggattttccatcatcacagagatctgacattgaaggatgtggagagagccagcagccggcagcagcatcaggggaaagcatcttaaaaatcagacaggacatggaaagttactaacaaggcttggtggagacctgagggcaccctagtgctatttccatgacttgcctaaagaagttacttttttttgaattaacagaggttggaaggtttgatggtaattgaaacacgacctgataggactcaattttattaatttaaagacataaagcttgcattatatacgccacgtctgcacatttgcacttcttgaacgtttgctatcacatgtgagggaaacttaattaagactaagagttatatgaagaaagttaactcctcacagaattttgatggatgtgattaatgagtttaatagctacagatttatgatttttcatcaacctgttggctaagtgaaatacgaattgcgtcagtccttgttactttagggggattccgggagaatggaaggaaggccaggggcaaaatgccgctgccctgctgtgcataagtcatttcagagcatgctctgagtgtttgtccttgccgaaaagtggctttacaggcaactactttaaaacaacttgctgcttccgttcttggtcagctctgtgatccaggctgccctctgtggacacagcacagttctccctggccctctgcctgtgtgtgcatgcacccatgcatgccaggcaccctgactcagtgaccctggaaagcaggattgagaatggctccatctgtgggcttttcttcccccatgaaatacagtgcaggactgcaatgctctcagacaatgtgctgagcctgaaccatttcttaattatctacgtttataagtgattatctcataaagtttttgttttgcaaaacagatctttatttaaacacaaacacaggttaacaactcttgaaaaagcatacataaaaataagtaaatgaaacaaccatttctgttgtcttcaggaaaatatgactgatacatttagaactttagaataagattccctctgtgggagtggagacccaaagccattataggcatcccaacaatttggcggatttattggtttaacagctgatacataagagaatcacagagtaagggccatggggaagccagacggatgagagtttctctgaaatgagaaacctcagagaagagacagggacagtctccaggctgttccagcgtttggtagcacactgtgctctggcggggtcttttctttggagctacctcaaggagagccttcttgtcccctcctttgaccccacaggatagaggacaactgctccctggcctggggattctgtcagaccacccctgatagcgcttctctcaccttacgtggccgcagacacacttgcatttgcttccttcctgttgtgaccctgggcaaggtagctagcctgtctgatctcagtttcgtcacctgtaaaatgggatcataatggctaccctgtctcgcacccatcctcaataaatggcagatgccatcagacgcccccccgcggatgtaaccttttctaccgtattgtctttcaggctctgcactcactcgtctcaacatttcccacggcccagcttcagctgtgaagcccacagccatagactgctctgatgtgcggcctcccacacccaggcagggtacatctgggtctgggcagccacaggacagggaaggaaggaggagggagcttgcaggggtgcttgttaaaggtgtagcagggcaggtaccacacacaggggcaggtggagcgtccaggggtcgcccgaggtggtgctggtcagagagggttggcttcgtcctgttctgagccgaggctgctggaggagggcagaggcctatgactgcatcgtgctcctggttagggcaggaacagcaccctggaataccccactctcctctttactcctgaattacaaaaaatacatcttgttctttagcataaattataaacataaaaaattcttatggtagagaaaacgtttaaaagtcatcacaaagtcaatataaattgttcagatcctaaccaaccacagcaaattcctaacaattgggatatgtctctccaccgtgtgtatctgtttggccttgtatctacctacctgtcctgctcttctcagttagcattgttttacaagcattttcccatgttactaacattttttgataagcaaaatttttgtttcattatattctatctaaaatatgtattaccattttataaccaatatcctagtgtataaagtgatgctgcttgcgatgtttcactcattatattgcagtacaccatctatttaattttttgaatactttttattagtattggtgcctagaaaggaattattgagccaatgggtatatatattttttaagtctttgccaaatttaaatatttgccaatttaaaaaataattaccagattattctctggaaggattataccagttctccctttttctagccacatatgagaccagttccacactacacccataacaactctgaatattttactctttgaatctttgccattctgacagataagaacagaatctcatttttatttgtacttctttaattttagtatttcattacatttttttgtttgtttgctgtgaacccattttggctagtggtccactgtgacctctggattttttttcttatttatacttttattctctgtttggtctagcttactttccacatatttcccctactgagcttggccaagacatgttttataaaatttcacatcgattcccatctgtccactctcccactcttcattttctttcctgtcagcacattctcccagctttgcttgtgtttgttgttgagtgtgaataatttatgtatacccactgatatcgcagaagctgtttttagtgatatcttatccatttcttctgtgtcctcaacagtgactggcaaagagtagaggttcaataagcacttgttgaaaacataaacttaaattttaattatttgaaatcataaagaggaagttaagatatcagagtaatgtaattatcattgtagacttcaaatagaattcttatgtttttagagacatttctcctagtaaaataacgttaattaaaattgacttaaattgatgtttaagaaagtataaaaaatgtagctgtagtatcttgaattcataatccaaactaacatcatcctaataactgcttgttatgtgccaagtcctgtgctaaactctcataatgtctcatgtgatcctcacagcagcctgggtactgctgctttcttacagataaggacaaaggattagagaggcgaagtatcttatacaagtcacacaaatctgtctcccttctctttatcatctgatctcttttttcctgctattcaccctagctgtacatagtgaattactgtgcagagaaacatgatgtattaagtgttatggagacacatgaaataattggataatgaaaattattatcgctggttactttatgttatctactcttctgggaaaaatcccataggcagcaattcttatactctaggtggctaatcaaaacaaagttctagaaaattcaagaggtaaaactctagcactgaattctatatttgctcagtgacaagaattctttccatatttggcgagatccaaggggcagtgcttccagattccagatcagctgctgatttaaatttcctcatcccaagtatcaacttccttgcactcgtcttgggcgtcaataatgaacacgcaggtcagagttttccataaggccttaacaagtctttcagcagggtgttcatggaattaaactctgggaagaacggtaatctgctgttgtacacagataagtacagagacattttgaaaagaaatgctaaggccaagcaaaatgatttatttttaaagtgccacatcagaatccaatcataacattaacctcagggctgttactttaaacacgtttggtaaaaacaatgcttgtcgaatttttgaaaatataataactttatgcaaagatcccgcactcttgcatttaacacattccactttttaaatccttctgccttgatgatttaaaatctcccttgctggtttttttgttttttaaatttaccaagtattgatacagaatcaagcactgaagacaggacccttctgctacctccacattcacattccccccaaggccattcattcagatcgtcagccagcagtgagtttctcatctccatgctctttgggtttcatcgggttttattgggtctttttttttttttttttaattttgacagtgtgcacatgatgctcacctttgaggaagaagaaactgttgaaacaacactttagaatctgtcaacacaattagtttgtgtctcaatttgaggtagatgtcccaagacattgctccaagttaaaaagaaaaaaaaagtatgtggttttgcattgcgtagtcctctttggatccatacgatatgtgtgccttccctgaccttccagagagcatcaaaaacatgaaggttgaatccagagagcacagcccacttttatctttggcccagggaggcacttggtactctgtatttcttcgtggcatccttaaaatagcctctgtggaaaagggattggccttatcttccgtgcaacggatgggaggcatagatatagctgctggcaaggggaagtggaaagaggcccatctgggagagggtggcccggagctttagtttgatgctgcaggacttccccaggtgaacgcacctctcctggccctagctcccttataggaaaatggaggtggtcagctccgccttctccacagtgaccatctgctgactgtgctgctgccaggacgcagggggagctaacagcagtgcccctatcggatcttcaaaccggggaggggtctcgtgcagtgggcaggggaaatgggctcccacctggcttttggggttcactccctggctgttctacttcctggccatttcacctttggcaagccacagcctcacaggagataggcttttccatcggtgaaatgggtagagtgatagttcctacttcacagggttatagtgagattcaccaagtcgcaagagcccagaactgtatatggcacacataagctcctcaatcaaagttagttaattttactattcattcaagccaaatacatttttcttctaagactaaaatcagggaatctatgaaaagcatttccccctaccttttttttttcaatttctacaacagtttgtgaattgaattttgttttcaattagccaatttgtccattttcctgtgatgaacatgtttttatctcttcattataaagtaagaactctgacagacacagtgagctcccaattattcacgagcacctgatctgcattggagattgcttaaaacagggctgggaaatgcttgctggtgagttcaccggacactgcacagcaggtcctggaaggagacattcagggcgttgttaacttctgtgtctccctattcttcttattctccttccatactctttctctctcattgcaatcgctatccacctggaaggcggcttgaaaaacacaaaagacaacaaggatgatgagggggacccctcctgagcctcttaaatgctgagggatccttcctggacctgtttttattcattccaagctgcctctcctagacaatcacttctcttaccccaggaaatctgggacggtgcaggtttgcaagcttgatctggaataaagaaacaaaggaaaagacggaccaggaggcttggcctacgccaggcaaaagtcagcaaaagcagccactacacatctccttttgagttctaacttttcactttgtcttgtgtgaactcctaaactggaagcatatttatagtcacgtaaaaataagaatattgtccaaggccaaatgtaagtgacttttatgagttattggactttgtgaattactcattctaccaacctgaattaacatagatagttttgttgactttaccttctttgtaagccaaacagtatgaactcggttaagccggtcttaggagaaaagacataaaatgtgtgttgctaggatagcattctagtgaaggaagccacttctttgtttcttgtgcatccctgtgagggtacctctgtccatcccaagagctgttttcatggactcactgttgaaagcccaagcctattgtaaccaattttgataagctggttacaaaataagcacatgtatacattttttaaagccttgttcttctggagatggaaaacatctttttttagatcacatgtttactgctttggtaaacagtaaaatgctgctacagcaattaccttgaggataaagggtttgtagacagatacttcctgcgttcacttcctacacagatagccagcccaaccagagacgcactgatgcaggaagggctcccagtggaaacttcctctctccgaatgcgtggtccattattcgttatctcctctccaaggggaataagcttgttgctccagattttctaggagaattctgtcttgaaacaggtaaaaatataaagtttctaaagtaatgattacagtacctcgttctcatcctcggtgtcatctactcggtgatttttaaggggacgtgattagactagaatagacttgtctatgagtaacatgccccgtaggcacctctgtctcctttgaatcatggaaaatgatgcataattcgaatgtttttatatttggtagaaaaataagtctctttgagattcaatggaaggccttttctatggttagttgaaaggtcattttagattttgctttctttagtcaagcagagattaccagatttgggtacaaaaaatatcagctcacagattgttctctgtgctgattttacagcagttactaaattccaacgaatgcattgtttaggccctttgaaccgaagcaaataaaaccacagtgcacacacactaaacaatagggcatcatcaattagccatctacaggatgtgtccttgcagactggcccctttgtaggagaaaaaaaaatagatcaagtcaacaaacaataacactgaacaataaactaaacaaaataaatagcacctgggagccccttaagcactggcgaagcaccaaagggtgatgtttacacactgtacacacggaaacccacagctccacccagatctcctgcaggtccctaaaatactcaaagaactcagcagccaatcattgctgggtcacctcatgttgaagggtaccccctttggcgatcagaaaatgctgagcctcttaaatgctgttttcattcactccaagctagctctcatagacaatcacttctctcaccccaggaagtctgggacagtgcattgcgaagggaagaaggcagtatctaacagagccttctgcctggcctattccataagtgccgatgactgccaggtggggggcagagattgcatttgaccccgagagactgccagacatggtgagatgctgtcatgtctcacgtagatgttattgcacgaatatattctagtgattttatccacatattcaatatatgtattttgtatttaacatgaaattgaattgaagtgaaattgcccaaagagatattttcctttagggactcatttcttcacatacttttgcttatcttgttggaagacacactatgtcaatctcagtatcctgtttgaatgaagactgctttcctcctatgtatctgttgcccctagacagtcattgtgcagcttgttacctttctgtgaaactccatgagacagctccagcattcatccttacaggtgctacctcctgacacttctgcttctttgcaaaatgacttccctgatctcctgagtctgtattgtttccagtgctgcctgaaccacatttgggtgatgctacaggaccagacagcagacagatttgtcatggatgcctgatgggataggaccctgttggcatcctctctgaaaatctcccttgcctggctagggattgttttattttattttctttagcctgtagcaaatacaggttcagtatctccattgaataatatattgtagaaagaaaggcagtaataaaaacttcgttctttttccccatttgaaaaacaattattataggagtttagaaaataaaaattttaaaaacaaaattaaaataattgatgttacaccatcaagggtctttgaatactcgattcttttttgattttttttgtctttactcctgtaccaatgtatcctttttaaagaataataaaatttgagaaattaaactcattgttattagtacctttctatccacttcttttttttttccaggatagtgaaaaaaaaaaaaaaaagaggagtgagggctgaacttgttacgatttagaaattaaggcccattttccttcttaagaacccagtttctctatatgaagcagatccagaccgcaggtccctgtcccaccacgcctttcacttccctgtgcctcgtttcctcatctgtagaagagagtcagtcatgataataactcctacttcttggtagtgttgcaaggattaagcagcttaatacttgtatgtgctttgaacagtaacgtgctgtagtgtacaaaagatgtaaattgcagaccaggcatgctggcagctgcctgtagtttcagcttctcgggaagccaaagcaaaggatctcttgagcctcagtatctgaggtcagcctgggcaacctggcaaaatacctcatctcataataataacaacaataataataatgttagctgttatgggctgttattggttacttatcctagtcacagtcttcttatttaatttactctcatatctcaattgtttttttgaagtaatcaattatcttccttgattgtgtttgtttccagtatttgtctttggaaaggaatcctgcatttatacctggttatttatagcttcttctaaaggggtgaaagtatttccctacacagtcatgcatcaccatgcccggtcagttctgagaaatgagttgttagatgatttcatcgtgcaaacatcacaaagagcacttacacaaatgtacatggcatagccggctgcacacgtaggctacaggctataagtgtagcctgtgctcctaggctacaaacctgtgcagcatgtgaccaggctgaatactgtaggcaattgtgacacttaacacaatggtttttatgtatcaaaatgtgggaaaggtatagtaataatgcagtagaggccaggtgcggtggctcacacctgtaatcccagcactttgggaggctgaggcgggcagatcacgaggtcaggagatggagaccatcctggctaacacagtgaaatcccgtctctactaaaaatataaaaaattagccaggcatggtggcacgcacctgtagtcccagctactcaggaggctgaggcaggagaattgcttgaacctgggaggcaaaggttgctgtgagctgagatcatgcctctgcactccagcctgggctacagagcgagaccccatctcaaaataataataattattattattaagaagggaaaaaaatgatacacctgtacacctgtataaggcacttaccatgaatggagcttgcaggatggaaagtggctgtggatctgggtgaatcagtgagtggttagtgaatgtgaaagcctaggacatcactatctactactgtagacttataaacactgtatattggccaggcgcggtggctcatgcctgtaatcccagcactttgggaggccgaggtgggcggatcacgaggtcaggagatcgagaccatcctggccaacatagtgaaaccccatctctactaaaaatacaaaaattagccgggcatggtggcgcatgcctgtaatcccagctacttgggaggcggagggaggagaatcccttgaaccagggagttggaggttgcagtgagctgagattgcgccacagcactctagtctggtgacacagcgagactccatctcaaaaaaaaaaaaaaaaagactgtatatttacactaaatttattaaaacatttcttcaatagtaaattcatattagattactataactttttttacttattaattttttaaactttttgactcttttgtactcacttagcttgaaacacaaatatgtggttcagttgtacagaaatattttcattctttatatccttactcaataagctttgttctattttttttttaactttctaaactttttattaaaaactaagacacaaacacatacattagcgtaggtctacacagggtcaggatcatcaatatcactgtttttcatctctacatcttgtccctgtgccactggaaggtctgcagggacaataatctgtgtggagctgtcatctcctacgataacagtgccttattttggaatccttcttgaaggacctgcctgaggctgttttacaattaactttttttttttttggaaatagaaaaagtacactctaaaataatgatgaaaagtatggtatagtaaatatgtaaaccaataacatagtcaactattatcattatcaactattatgtactgtacagaattgtatgtgctatactttatacaactggcaacacagtaggtttgtacaccagcaccaccaaaaacatgtgagaaatgcattgtgctacagtgttactacagctgtatgtcactaggccatagagatttttcagctccattataatcttatggtaccctcgtcctatctgcagtctgtcattgtccaaaacatcattatgcaactcctgaatgtatgctaattgctttgttctcatgctattcctttgaggacagtagagaaaacataagagagttacaactgttattccatttggtggctcaactgacatgttaaccaaactttcaacagctgaactcaactgcatttttgtgagcccagaaaatcagtagttttgataatttaaagttggagaaatgaaggacgttcattgtttcctcccattcttatgctttgggtgatgctgttaaataaatgaatgtgtttgtgcaatggggagagaccactgttctctggagtggatctagaggttaaaaagtcaagctattttgaaccaactacttagagtggcacattctttaggggaggtgagcagggatctattgaattatcatattgctggttaatcatgattaagaatctatagaaccccgaccgggcgcggtggctcacacatgtaattgcagcactttgggaggttgaggcgggtggattgtctgagctcaggagttcacgaccagcctgggcaacacagtgaaaccccatctctactaaaatacaaaaaattagccaggcgtcaagaccagtaactcaaaacgtgtgttgttaaagttctatgccttaagttctgtggctgttgtcatgtaacctttcagtcatgctgatggtgcctattaaaaagcaggctatcagtaaatgtccatttcataaatgaataaataacttcctgcatgacaaatgcatgagtgagtgcatgaatcagtgatgtggctggcaccctatattaaaatcacaaagaattgctgttttttaaaaattttttatttttttgagacagagtctcactctgtcgcccaggctggaatgctgtggtgcaatcttggctcactgcaacctccaccctctcccggggttcaagagattcccctgcctcagcctcccgagtagctgggactacagacgtgtgccaccatgcccggctattttttgtttgtttgtttgtttgtatttttagtagagacggggtttcaccgtgttagccaggatggtctcaatctcctgacctcgtgatccacctgcctcagcctcccaaagtgctgggattataggcgtgagccaccatgcctggccgagaattgctttttatatcatgaaagatggagtccattttccccagatgcatatacaattgttatataccacttatattaacaaatccatacttttccaaaagagtggtttgaactatgactttttgatttattttttaaaagttttattttatatatttaaggtgtacaacatgatgttttgatatacatgaagatggtgataaggttctgatagtgaaggcaaattaacatatccatcatcttacatggttacacattctttttttgtggggcaagagcacctaaaatctactcttaaagcaaaaatcccaagtacagcacagcacggtattattaagcatatcccttatggtgtacgttagatctctagacttgttcaccctgcatatttgctactttatattctttgacctacatctccccatttccccattgagtctttgtttgtttgtttgttatagattttacatataagtgagatcatgcagtatttgtctttctgtgtgtggcttatttcacttagcataacgtcctccagattcatccataatgtggcaattggcagaatctctttttgaaagctaaatgggccgggcatggtggctacgcttgtaatcccaacactttgtgaggccacggtaggtggatcacttgaggccaggagttcgagaccagcctggccaacatggtgaaagcccgtctctactaaaaatttaataattagtggggtgtggtcgtgggtgcctgtaatcctagctatgtgggaggctaagacaggagaatcacttgaacctgggaggcagaggttgcagtcagtcgagatcatgccactgcactccagcctgggcaacagactgagattccatctcaaaaaaaaaaaaggctaaatgatattccgttgtatatatccaccacaatttattttatgtattcatccattgatggacactttggttcctttcatatcttggctattgtgagtaatgctgcaatgaatatggcactgcgggtatctttacgagatagtgattacatttctttgggaaagtacccagaaaagggattgctgggtcatatggtaggtctatttttaatttctttaggaacctccatacttttttccacagtgtctgcaacattccatgttcccaccaacagtctgcaaggattcccttttctcacattctcgccaacacttactatttcttgtctttttgaccatagccatctgaacaggcgtgaggtgatacctcattgtgtctttgatttgcattttcctgatgattagtgatattgggcaccttgtcgtatacccattgttcattattatgtctttttgggaaaatgtctatccacgtcctttccctatgtttgggaaggtcagatgaccgggggctgcccagaatctaatgagtgctgccgagtacatgatggtcccttccaggccatggatgggaatgtttcacttgtaaattaaaagcaggaatacagtttccaggcaacccatagcctgcattttgctacatgacacttgccttgatgagcaaaaccaaacaccactttcatttttattgagcagcaacacctaccagcatttatccaggatttgcattgggtcattgaaatattcaactttgacaatctattatataataagtctttctggacatgaactagtgacaagttgtattaatgtgctatgatagggactattcatttttcttcttttgttactacagtcacctctttgaaatgtcagtgaaactgtagcaatcttttaaatatgtctgctggtgtctagtatattgattcacactgagggtttctgtattcattggaatcaggcaaattacaacacagtacttattatataaataacatctctaatggatatgagatagcataacattttcaataatagctacgtttgtttttgtattcagtttcaagatgatctgctttataataaagattaattttagcaagtaactaccagcttatctaagccaaatagtaaaactgaaaacccttctgtaaatttaagattatccagcatattatttaacttagtgagccttactggttaaaacattatatataggccaatgaaaatgtaatctttcataaaatctgaagtattctattatcttgataagatttttagtggactgtttctttaatcatttaagaattcatatcaccattgtttccacagcgtccgcatgtaaagtgctactctgtttcctgaatgaatgaatgcatgaataaatgatgcatattgaaatctttccctgagtaaagcatgcatttggcaatgtatgtgattaaaagaaatctgacttggttcctctcctagaagaactataatctagtttttaaggagtcaaataaaaggaaatgacctttatttgagaattaaaatgttggaaaaaacttgattggtcatttaggagttcattgtttctcaacctaattatattttggctcagtatactcttaactgtttttaggataattaaaaggaactcctaagagagctaggatgctgttggaggagtaagtatgcatgaaacaatcataatttaactaatttgcccacaaatgttagcaggaaaatataccaaaaattagattttgttttccattcgttatttttcttaatttctaacataatttttaaacaaaactgagagatgtttgtcaaaacacctcccaagtgatgatttccattagaatatgaactagacacttttcctccagtgggataagagccagattttcctaatcacaaaaattagggcatggtcaggcaaaggagtttacatgaaaagttttgcaaaattagtattactttgaaaatttcaggctatttggccactgcaaccagggagtcacttaattcttggcataaactccagcacttttggaaattgacctaactctataaggcaaaaaaaaaaaaaaaaaaaaaaaggccatatagtgccctaaagtggcaaaatttttgttaaaaacagcatccacaagtactgttaccagtttctcaggatagctgtgacaaattattacaacctagtggcttaaagcaagagaaatttattctgttatagcttgggagtccagaaatccaaaatcgaggtgttggctgggttggtcccttctggaggctgtgaggaaggatgcatctggtgcctcctccagctccgggggttgcctgcaagccctgtgttccttggcttggacagtagtcctctcttatccgcgattccactttccatggtttctggcagtttcatctgctgtctgaagatattagatggccatttctagaaataaatgaatcatacgtcttaaattgttcaccatgctaagtagcatgatgaagtcttgtaccatcctgccctgctccacccaggacatgaattccccttttgtccaccgtatccatgctacagatgctacctgcctgttagtcaccgagtagccctcttggttatgggatcgactgtcacggtatcacagtgcttatgtgtaggtagcccttcttttattcagtagtagccccaaggcacaagaggactgatcctggcaattccgggtatgttaaagagaagccgtaaagtgctttctttcagtgaaaaggtgaaagttctgtacttacaaggaaaaagatcatatgctgtggttgctaagatgtacagtaagaatgaatcttctgtctttgaagtttgaagaaataaaaagaaatctgtgcttgttttgccgttgcacctcaaactgcaaaactgatgaccacagtggatagtaagtgcttagttaagatggaaaaggtattgcatttgtggatggaacagaaagtgttccagttaatggcagttgggttcagtcctgtctgaggtttcagacatcccctgggggtcttgtagtgtgtcccccgtggataaggggagactgctgtagatgcatcccttccgtctctgcttttgtcatcccacgaccttcttctttatgtttctgtgtgtcctgctcagcctcttatgaggatgctctcactggatttagaacctaccctaatctatgatctcattttaatcattaattacatctgcaaagatcctacttctaaataaggtcatattctgaggttccaggtggacgtgaattgtggggagacactacttagccagctacaggtgggaaggagaccaggcaggtctcaagggtggcagcttcaccaacaaacaacggttgcccattggaagagccaggctccattcactgatatctcccaacagaccaggtcctgatggcaagattgttacactcatacttaagtataaatcatttatgtgcaaacaacattttgaaagtgccaatgcaattagttttgttgatgaaaaaataaaactttatagcatggatattaaccattatattgttaaatccagcataatagtcaaaataaaatcactgtaaggcaaagtgtttactctgcaaccatttcagtttcacaagatactgagtatgatgttgtggttttccttatctcatcattttacttggtaagtgtcgagacatgcaaaagcttagggcagcccacacagttcgtcagaagcacacgtggggagtttgttacttaggcagccagtcacccccattctatgtgtcaagcctggactaatggatgacagtggtgattacatcctatgaaaaatgattcatgtggctgtcttcaggaaagtcttcacgttgcacctacacagtcctaagactgaactcataaaacggcatcctatactaatattattgtcaaacactatgatttctttttgtcttctgtctttgatatctgcacctaaatattcaggtgttactcattcttatgaaatgggtcagattccaaataaaaattgaagttcctcttatcactgaccatgagggctctgcaagattgtcttgggaaagaagatttacattaggagctaggtcatggattcttgtcatgtctgtgtgtgcccttgtctacgtccaatgcacacaggatgaaaaactggtcagctcacgtgcccatagcccatcttcacctcacctcaagctaagacaccaagaaactcccagtgttcctgggagaaccaggccagtggaatcctgggcttgcatctaatttggctgcaaaaatggagatggtgcatatccctgcaatgtgagagtcagtcccacttgctctattttcacagttccttctctgtacagtaaggattttcttagtcttacaaaggcaggaaaaggaacagttaagcatgtaaatgcaaaccatgaaaacaagacctgttgccaggatatcttgtcccagggtacagtagtacttcccatgtaacacacatcctctaccatgccactctccaaaactgttattggggccggtctggagtccagcatgagtgagatatgtcatccttataagtgagataggctcagcctcgttgtgtgcaaacacgtctctgaggcctggagtattatgacttacctactggaaaaagagaaactgggttcaagggagagataagatcgaatgttaggatggactattttgatagctatctcaggtcatcatgaagattgcactaaaaccttggggagataaatttgtttaggacatgctaaatatatgttttccttttttctttctatttaaaaaaatctgagttgcagtcacattaacaggtcagtaacatagaggtttggttccctcatatgactttctgcatgtactttacatttttttcttgtttaaatgctaggcatattgtgtaccccacattggtttgtagccagctctatgtcatagggcccttaccctttacctatttattgttagtatcatgtccataaacaagccaatggctcagcatgaactgatgctaaagaaagctcatgcctgagtgataaattaagtgacctcagctatttctcttcagtgttgtgaaagttatttttaacagtaggtttcctggtagattctctaaccactcggtatttcacatggcccaacttggttaactcgactggttacggcaaatgctgataaaggcaagatcacaggtttgctccccatgaaaaccaataacttctcggagattaaaaaaaaaatctcccttctgtgaccacaagcagcatcactcatgcaaatgtcggaagagaggaattgggagtgagtgagagtctagcccagtgcaaatatttctactgttgaaaaaagaagtccaggcgcagtgactcacgcctgtcatcccaacattttgggaggccaaggtgggtggatcgcttgagcgagaccaacctagccaacatggtgaaaccttgtctctacaaaaaacagaaaaattagtggggcatggtggccttcgcctgcggtcccagctacttgggaggtggaggtaggaggattacctgagcctggggaggtcaaggttgcagtgagccatgagcgcaccagtgcaatccagcctgggcgacagagtgagactctgtctcaaaaaaaaaaaaaaaaaaaaaaaggaaagaaagaaaagaaaaaagaatctctcaagcatcaagttgtgttcctataggacacatgggtttctgcatgaaagcaactatgtccagtcccctaaacctggtgattttattggaaatacctccagttaatttttacgctaataacctcagcccactcacaccaaggccaaaagttaccagagttatgaacagagccattgcccaccttttccccctaaacgttgttgttggtgcacatctgcagaaagaggccgtttacgtggaatttcaaatctggttgtttagtctacaaggaggggggaaggattctgtctctttaatgtttataacggttggacagagcttgtcgggtgaaggttaattgctctccagtttaagcagttctgtgcccagatgggttatcagggctgaacactcgttacaagactaatctcatttccgacaagacttccctttccttcaactgatttttgcatggccattggagccgtcatcagccgttaagaggagggtggattactctgggatattaatgctggtatgtggtgaaacaatgcggagtggtgttgtatctcagggaacatctttaggagaacatgtttcgctggtgttacgaagagccaggctcctaaacctaaacgtggagacaatgggacccctgaagcgaggcacttggtgaaaggtgtaggggcgattgcagcccgcctctctctgaggaggaccctgccctgataatacacagcgacacttagggctttgtttgcttttgaagatttttttttttaacgtactacgttcagattttcattcctaaggactacacctaagcagcgaggagttctgtttgctgctgccacacggagccctgtggcagggagcacctgtgatgcagcaacttcatttaattcctgtgaaacgtcaggcttctctttaatttcagagatttcatagatgtcatcatgacatatttgcctgaaaatagtaggcagatttttaaaaatttaataacaagtagcttcctttctttagtttgtctcaaaaaattcttccaagaaatggcagaaaggcaatgtctttttatccctttgggatttggtgtgtggaaattgactcattcatttactcactaaggatttactgggcacccactaggctcatgggtgctgaggggcatgagcagcaggacagctgggctcactcagtgctgtcaatcagggggatgcagatgggggagactgacaaatagatcacagctcaacgaagacagagtgtggcaggaagtcaggagccttaggagggaaggtagggaacatgatagagccaggtggccggggggcgggacctctagtttagagaacatgatcaggcaaggcctgtcagacagagacccaaagaaaaggtgagaacaaggtttgcaaatgcctcggaggagtgatgcggaccaggggaatggcaaaggcaaggaccccaaggcggggacaggcagagggtgtctgagagcagcacatcctcttataatctagtttcacagaggaggctgtcagaagaacagccctaccctaaggaagggtccatctgctttgattgtaatcgggcacagtcctggacaccgagtccctttctgtcaggtgcgaaaagcttggggaatgcatcttggtcatgggttgctactaaaatgagcgtgtcatcttcaggggacaggaattaaaggcacagagaaaaactgaaattatttagcttcccttcccttctcccttcttcccatctcccatcccttgccactgattatggtggggctggctttatatattctctagtttctcatatgttgacttatttttgcagtcgtttcagttctaggccatttggtgcattatgttccgcgtttatgggcatgcgctttggaaccaggcagctggcttagaattctggtgcattaactggcaagatgctctaggcaacttatttaatttttggagtctcagttttcctcatctttaaaatgggcataatggtagctagtgtgcaggttagatgcattaattcacatgtgcatgtcttttagagccgccacgctgtgatcacgttattaaatgttagatgttatcaggaaggtcctatattgtctacgatgcttcactttctttgattcatctgtttcactgagaaaagtgagataaattatcattaatctagagacatttttgtaggctaaaggcttcttatcacaacgttttctccaaaaaataacgaacagacaaaaaaaaaaaaatggagccaagtctttcaccgtatttgtttgtttatacaagggctatatagtcaccaccttccatacaggtaggagtctcatgactttttggtgaccctttcagagcaagggttatttctgccccacaggcatcatttgacttagtgagattttcaacacaccctcaaagcacatgttttttagggcaaagagttgaggagaagagaggcagggtgaaagtctgagcctttggtgcagcacctctgctggcttctgagactctgtgtcacccaggggtgggaggacagttctctccagggcactcatcaggaccctgctgcctgtggtcatgagacaaggagatcatgtgtcacaaaggcactcaacatgcagaggcggtgtcgcctgtcacctggaggggctgcacgcaatgaacttccagtctccatgtgacctcccacttcttggctttcctactgaggaatttgccatttcctgtcgagaagtccagggtatacaggagcagtaaatgccgtggagagggtgggggcgggagaaccacaggaagtcctcagatatgaccatttgggttggtggagtcgggaccaacaatgggttttacctctcacagttaaactccattgatgatgcacagttgacaagaattgcccctccaagatctcattgctgtttctgggaagtaaacgctccttaaaagatttacttgtgagtaaacttctaaccactcttctttagctgtctaaggaaaaaaaagtcagttggctcatgttttccaacttacttcctattatatacacacatacatatacacacacatacacacatatacaacacttacacacacatacgctcacacatacacatgcatacatacgcaaacatgtacacatacacatgcatacgtacgcaaacatgtacacatacacacacacacacatatatatatttatgcctgtttagatccaaaatcacacactttatatagataaaacttaagtgaactttaatatctgtaccatacatttaacttcatttcacaaaatagtaatatgtccaaaccacgtctttcaaaaaaaattttccctctctcaattattttctctgagattacaaaggatatcttctcctaggatttgtaaatgcatcttaatttttgatgctcccagatttgagtcaatttcccctacgtgaagtgaggattaagtttgaatcattattatttcaccactctctggtatctaaaataattatttttttcttatttaaaattgtctttaaaaaacagctttgtatatatatatatatgtatatatataattgaatgcaaggtcatattaagatttaaaaccatgggctcagtttctgaaagagcaatgaaaagctggacaagataaaggaaagaattcactaaagacagaggatcccacggaagcttcgcctgcctaggcagagtgtgggtaatatccagatgaggctgaagtgatgtgagtcaaatttgggaatttatttgacctggctgagctcctgtgcccttttgacgtgtctctaagccttttttttttttttttttttgagcgcatcctccatttcattttgaagtatgtatttgtagacggttttatgctgtgaaaatgaaaacttgctacacctcagaactacgtctcagaaggcagcggactggtcttgcaggtcccggaagttctgccccgcagtgcctgctgcctgcctcatgccgggtctgcaggcggggagccgaggtcagccgaggagccaagctcaagggccgagatgggctgcaaaactcatttcctccaggccctgctggggctccttgaaatggaaaaataaaaaagtcaggcccagcatgcaccaagacagggcagacaaacgacaagactgcaggtctgagctccaagcgcacgaattgcccacgtgcagccattttctgctttgagcgtcatggaaaagagaaacttagtagctgagacacgtttcttccccttctcctgtgatttgggaatgcccttttccaaacgttcattttcttttttctccctcctgactctcagggcttcatgttccttatcgtagagtgtagctgccctgtggaggcctgcgcaatgtgatgagctcagcgggggtaaccaatattgccacctcacgtgggagcctcaccactcttaggacgtgttttcaggggagagttagagttttagaagttacaaataccacactcgcaagcaaactttggggacacaacctctgtctttatctctaaactggtgatcctaaaatatgtcccgtatactatgtggagtggcatggaggagcaaatgagacggtaattgaagggtgtttattaaattataaagtgcccagcgtataatcccgtcattgactttacataatggctagtgtaacacccattgcatagagtgctggcatgcagtattttctatgagtgacttaaggtggcatacaataatagtgcaccgtttcatgccttccttccttccttcctttctttcattctttctttctttctttctacaatgattttacatctggtatgtgccaggagttgttctaggttctgggaaaacagtctctgccctcctgggttttacattctggtgtatcttttgtttcaggtaatactcaaatcaacaaatgcccgcattcaggctcatcatacacgctatacgatcaaatgaagcagcatatggaatagagatcaacaggggagggggaagcttttggagggaggatccagtgatctcataaagatcttgtctgagcctgttagttctgaggtgtgttttggacattgaaaaacctgaaagtaattaaccttcccaatctaaaccgtattttccacaaataggtttgttggatactagtattttcacgtgtaattagaaaaggaattactttccattattaacaaatagatgtgactttgactcatgttcattttttttggccacaaattctcagacttttgatcttaatggtcaagtgcaggtaagaggaaatgaaacaaaattaagcaatgatttgaatacattttctcccttgtagaagactaattatagtttggtcattgagtaattttctcagctgcttaggatctttaattaggtttgatattcactatgaatgtgtggcagggtttcttgggaaagtagagacgggataaaacataaatgatttatgtaactggatatgtcccagagtgaatgagactttggtctcaagaactgttccagtggtttgtcgttctttgatgagctccgtaagtgttgctcttctcaacagaaggttgaattttaggtgaacagcctttcctgattgtgtagatctggaccacagtttgaaggtgcccctccctctccctctgattgccagagaacccctgcattatcacagcaacccaagtcaccccacgtattcccaaacacccatctgctcaggacagaagaggcattgcctctagttgagaaccaagaagtggtcatttccttaaaagctttgtcttgtcttattttaatatttaaatcaaatgacagaactgtttatctatttttatcactaaactccatagtccaattttcgtcttcatacaaattaacatgtttttacaaaatctctaatcttatgcactgctcactggcaacctctgtggtgaactaaaccgtaatgaataataggccagagagccaatgcagcctaggttgcctagaggacagagaaacccagtggcaatttctgcagctttgccaacagccctgagtcacctcgaccctcccctggctcctggtccagtctgatgaaacagtttacaagatgtcttccaggttagcttttcttgttagtatctgctttcaactcaaaatgcacacactcaattaaatcttctacttctgtatgacaatgttaatagactcttggaaaaaataaatgaaacagaatttaatggtgccaaagttgattatacttttagttttccatggtcggaaagctgggtcaattttatttggttcctggtccaggacttcgcctgtgaagcagtttgacaaatgtaattataaaatgtaaatatggaagaaaagagataccagtgcagagtgaactagactttactcatttctgtggcccctctgctatccactgtgtagatggtcaatatgtatttggtaaggtaaatgcaattatgacagaaaaagcagcacatggaatctttacaagtaaataatttttactagcttaacagaagtattttgaaaagagaaaaatcttacgacttagcttggcagattagacaaagctaggatcagcatataagatccctgatattcctttctttctgccgtttattcatcaccttcccccaaatgagttaggtcatctttttgaactttaattcaattaactccagataattataacaataataataataataataataatagaaaacactcatagagtgcttattatatgctagacattgtattaagtgttttgcttaatacaattgggacagagaagacaggttcctgcaatcattatagccatttcacagatgaggaaactgaaggacacagaggttaagtaactagatgtgtatccattcagcagctgtgcagtgggttccggagatacagaaatgaatcagatacatccctgccctccaggagcttacagtttaatggcctgaggtagatgcataaaccataggagtacatagctgcatatacaaactgcagacatctgtttgcaatatagattatacaattaagaagacaaattgctggggaaatcgttgtaataaatatggcaagtgttaatacccataatttatgcagatcatgttacaactgaatgagatcacatgtgtaaacatattctgtgagctgtaaacaggagggaatgtaaaaggttataatgactactccaacacagctttattaacatagacaataaacctgtgaatttgttacttttccaagtaacagcaagacttgtttaagagctgcctagaagttctgggttttttgtttttttacttctccatgtatttgatagtaaaaaatgaaagataatttattatatcataaaatgtgtttgttacaaattaatattgcctgaaaggaaagaaggagaatagcccaaagcagttaatacaatgattccgcaggaatcaaggtgcagctaattatatttatatgtactcatcgatttttctaagaaagtaggatattccaaagcactagagcccagcccatgtgatggtgttcgtgagcatttgtggcagagtttctgtgaagtttgcatccaaacagatgggaatttttcaggtaatggcatacaagtaacaggtaggtagactactcatgtcttgtaagaggcgtttaaattttatcacggggagagatagactagtcagtcactcagtgtttgctaagtgcgttaatgagtcacagatggatagacatggcattaaaaacaagcatgcccagagttctgaggatgaggctggactttagcataagttgcttggattctctgactgaaaccattcttcttagaagcccttctataatgtaaatagataaggggacccccagtggcatgtcaaggccatcaggggtctcgggggctatggtttttttttggacaaagggctagagttctggtcttgaagccacattttcttttttttttttctttttttttttttttttttgagacagagtctggctgtctcccaggctggagtgcagtggcgcgatcttggttcactgcaagctccgcctcccgggttcacgctattctcctacctcagcctccctagtagctgggactacaggcgcccaccaccacgcccggctaattttttgtatttttagtggagacagggtttcaccgtgttagccaagatagtctcgatctcctgacctcgtgatccgcctgcctcggcctcccaaagtgctgggattacaggcgtgagccaccgcacccggcagaagccacattttcatagtgagcatggtcttttcaccgacatggcaggtttgttggggtggcttgatgaggtatatggtgaaggctcccctggcattccagttgccagaggggactttagaatgttcaattctttcctctgctgtcacatgggttttagcatcatcaactgtggtgaatggagcatccagatcttccaattcatcccatgattcttgtcaaggaaaaaaatctttaggatttgaggccagcactatgggaaatttgaaaagctttgctcctttcaagtttaatttttgctttcagaaaacaaataagtttacagtatgcattccatgtgaactccaatttccctctctatattcagagaaatacatatctattttctattgcacagagctacggaatagtttaccaggcctggtagcagcccaacaggagagagaaaggagtgagacaggctgtggcagctgggagataagtgcaattgatgagctgacctgccgggtggggaggaaggtgccgacctataggaaccacagtctcattccacctaagggctttctctggctctccaccacagccctttcacttgaagcactaacacgtcaccttgtggactaagaggagttttcaccttttctccttttctgcacccagcttcaatcattggttgatgaccagtgaaatgttttaagaaggcaggaagctggagggagaaagacaaaggcttacatatctcccagaatgggtaacaggctacagcatgcatggccatgagttggatgtgcacatgacctgtgtacataaatgacaccctcatgcacacatgccgtaagtgtgcatatacattttgttaggtcaatttctacatcatattccagaaagtcacataatcagttttcttttttggtattcacaattcacttggaattcaccaatttattatgtgacttgaatatgtatggcctttctgctgagtggatcctgaaatacaaatacttactgttactggaagccccaaagtcaagatgcaaattaatagatttctatatggcctcagatctgagtcctctgaaactggcgatttaacaagagcacatgtacagttacagaacctccgcgggtgtgtctttcagggttcctgtttcttatttccatgtctctgtacccaacacacttcctcctgacccttctttctctcctcctcctccacacccgcagaagcacctagccccaccacacataacttgctagtataatgcatttgttcttggaaaatgtgtgtttttgcacactttggtttccacctgcttttttgggaagatgtactatatgatgcataaaagatccggagctagctaggaggagggaggtttgtttgaggcaacagtgcaagaatatcaggtcattctttcaattgcacacttcagagtatggatacttcccttgaaacatttgcagcacaagacttttgcattgacaagcctcttgcttttgaatttgagctgtcaaatgttgtttctgctttcatttgttggatgtttctgcttgaactacaaggtaggacctcatatagataaaaaaccaagtctttaacccatgacttgagggccgagattggattctgattctcagcacatccaaacatgtcttgaatttgtagccactccttgccaaattaactacctctgtgactttaagagtagctaataagagtaacaagctctagtccctctttgcaggatgtaagggtttctaggggccagaacatgttgggcttcttacgccaggtgaaagatgttggatttcattttggggaaaagtgtaacatggtaggattatcattccagtagagaaaccctgtttttcagtttgtatatgacctcacatgacttcacagtttggggctcccaccctgttgtaagttgtccacatttggaagaaactgtagttccaaccaactgaatcaattatctgtaaagttggttcatgcaaatcagtgcatacatgagactgtgcctgtttggtttgtcataactattttatcatatgaagaactgaccatccataagaataatttcccagacctgtcattctttaaattccttttatttttgcttccaacatagaccccccctcactttgggagtatatcttccaggatcatgagcccacgagaggccatcttagtacactgtgtaggaattaaaccactcctgcaaatgtgaaacaaactgtacttttcaattaattaaaatcatattccagtgtgcctacctaaataagagtgatattgttttgagcaagatgagatgatttatatatatataaatcatatatacatcatatatatcatacatatctatatcacacacacacacacacacacacacacacacaccccagaccatcagacagcctaaactgttttaatgtatggaccattattgtagtgatggattttcttcttggttctagtttcattcatacaagaatgctgatacatggacaacaacaagacaagaatataactatttgcagcctattatgtattatttcaatataacattaaagtctctagtactggggacaaatttaaacgtagctttaaaattatataaataataatgagcatttatcactagtccccagaaatacaaagtctagcactcatctctccaacaccgtgctaactgcagacagtttcacacccagcatcagaatcccacaggagtccttagctcctccccattccagcccaggcacctcctctgaaaggcacaaggcggtcagggagggccatctcatctccttatttcaatctctagttttgatggggatgggatcaaggaggatgagatattcacagtgacatattcagtatcggagaaccaaagtaaagtggttagggccgtcattgcacgtgtggcaaaacttataaattaattggaatacttcattttttaaaaaatagactttatttctcagagcaattttagtacgcagcaaacccgagaggaagatagagtgatttccatacacctgctgcccctacacttgcgtagccttgcccacattatcaacattccccatcggagtgcatttgctacagttgatgaacctatattgacaggtcattatcacccagtgcctgtagtttacattagcgttcatttgtggtgctggacattctgtgggtttggacaaatgtatatttacatgtatccaacattataggattatacggaatagtttcactgccctaaaaaccctcagtgctccacctgttcacccctccctccctctaatctttggcaaacactgatctttcagtatctctgtagtcttgccttttccagaatgtcatataattggaatcatataatatgtagtcttttcagatcggcttttctcttgggatgcttaatttttcaaaaagtctctgtgcccatctcttttcatggggaacttgattggcacatttaaagtacaattcaactaacaaaaacctacttacatagaacacttcagaaacacaattacagacagcagggtacacttgtaacatcccacaggcaaaaacaggacaaattatttggagtctagcctcttacagaggaagaatccatgttgcactggggcttgcattccttggaggtggagaagatcattcctaggactagggagcaaattgagattttaaaacatgaacccagaaccaactcaaatgctcatcaacaatagactggataaagaaaatgtggcacatatacaccatggaataccatgcagccataaaaaaggatgagttcatgtcctttgcagggacatggatgatgctggaaaccatcattctcagcaaactaacacaggaacagaaaaccaaacaccacatgttctcactaataagtgggagatgatcaagagaatacatggacacaaggaggggaacatcacacaccagggcctctcggggggtaggagggtaggtgagggatagcattaggagaaatacctaatgtagatgatgggttgatgggtgcagcaaactaccatggcacgtatataactatgtaacaaacctgcatgttctgcacatgtaccccagaacttaaagtatatgaaaaatagcattatctaaaaatgaacatatcctgtagaataaaggcaacttcaaagaattcgtcgatatgataggttagcagttggaatttagacaataaaataaatgcagttaattatgaattgtattaatgaaatgaaattgctttccacagtgtgtctgatgttttaggacttcttgtccacaaatagtttgaagcactgctgttactctctgggtactaggcagaaaagcctttgggactacggatggatgtgtgaggcttttatttctgggctttggaagtaagaaatatgacctattccccaggaaaaacacggaaaccagaaggcatggtaattcagggttcaaccacaagaaaacaaaaagttcagttacacataattacacttttctaagatagaatccaatagtaacatattaacaaatagttgtttaatatttaatttggtttgccaagggaattcttaataagttctgaattatttcataaaaaaaaaacatgaacccatccccagtgctcatcctagtgttcggagtttttaccatttctgaatcacaccttggaatcaatggagaaaatcctgctttgatgcacccttgctgcttagacgacaggacttcttaacccatgaccccagtagcatcatagataaaaagggtgtgtgaaaaaggagtgaggggatacgggaagtgggaatacaaagcctggattacgtgcagactgaaagtcaaactctggacggggcatcccaggcctgtggaaaccagaaccaggctatggatccaatgggaatttcctcagtttcagcttccccccaaccagcacacataccctgggccctccccagctcacgaggggtggccccacttctatgcttttccttgcagtttctccatctggaaatgctccccaccattttgatttacccagtacaccccattcttcaaggctcaggccagtgcacaccagttcctttaatccctccttccttcttctgtcatccagtcgacacacttagcatgacatttggcacctgcataccaggagctcatgcaacaaatacgcactgcatgtgcatgatatgtggacacttacaggctctgaaaaagagaaaaaatagaaaaaagtctctgccctcatggagccagtattcccccagccctgacgaatctcctgctcctttctcccagtgtatttcttcccctctgttaaagtagttcctagagtcaaccacatgcagaatgagccttcaccaccatcaggctcctgctctgcacatgatggatgcccagccacttgatcttagtattaaatgcctttgagactctgttttataataaaatgagacacccaagcacagaccccagcaagcaggtaaacagggaggacctttcagtgtccaagtatgggatacacatttaaaaattaaaataatctggttatatttaaaacaagtggcccttaacattaattggggagtgccacttgccaatccagagatgcaccaggtgtaccaagatggacacactgggagataggcagggagtctgtgcccgggctctgcagtccctcagccccagggaccagtgtctcaagctgcctctgatccagaaaagcacagttagcttggcaacaggttggtggtatgcagttgctgctcatttcctggtccgctttacaggcctgccccttgattttgccataagacaggccacttgcaagaaggttcatctagaagcagatgtgtgctgtgtagctgatgggtgggggtcatgatgggcagcctgcttctttagtagactgtgtgcagtgttagagagccctggggcagcactcgtcagttaggatgcacaaaaatgccaacccccgactctcagttttttaagttgcataaattccaaatttaacatatcaccatgtgcagtcttggaaggctcaatattggctttaaaaaattattttcctaaggactctctgttgtcaacttgaggaaatggctaacaagcttccttttctatgacacttagctactgaaaatatgttcttcataaagtgtcttattactgtcatactgtgggttacttcagtaagtacagactgtgtcctagccaagcttaaaacctcgacggcagtgattcttaatcttttggtctcaggacccctttacgttcttaagattggttgaggattcttaaaaaaaaattgtgtatatgcattatatctattggtagaaacaaaaacagaaattttgaaacatttacttataaattcatttaaaaataacaataacaaggccaggtgcagtggctcatgactgtaatcccagcactttgggaggccaaagcaggcagatcacctgaggtcaggagttcaagaccagcctagccaatatcatgaaaccctgtttctactaaaaatacaaaaaaattagccaggcgtggtggcgggtacctgtagtcccagctactcaggaggctgaggcaggagaaggcatgaacccaggaggcagagtttgcagtgagccaagatcgcgccactgcattccagcctgggcaacagggcgagactccgtctcaaaaaagaaaaagaaaaagaaaaaaaaattagccaggcatggtgggacacgcctgtaatcccagctattcaggaggctgaggcaggagaatcacttgaacccaggaggcggaggttgcagtgagccgagatcacaccattgcattccagcctgggtgacaagagtgaaacttcatctcaaaaaataaaaataaataaataaactcattgcatgttaacacaaatgagatatttttatgaaaagtaactctattttccaagaaaatgttaatgagaagtggcattgttttgcattttttgcaatctctttaatgtctgggctaattggaggcagctggattctcagatctgcttatgcctgcccttagaggggtctggggaccccagggggttcctggacaacactttgagaatgactgacctacagagctccggagaatcactgacctacagagcatagtgtggtacctggcactgtgctaggcagggagatacagcagtgaagaagagggacacattctctgccttcctggaggatggtatgggttgaatagtgttccctgagttatgttgaagtcctaacccccaggacctcagagtgggaccttatttggaggtagggcctttacagaggtaatccaattaaaatgaggcccttagggtggtccttaattcagtgggactgatgtccttataaaaagaggtaatttggactcagaaacaggcatgcatagagggaggatgatatgaagagacagggagaagatgaccatccacaagctaaggagggagtcctcaggaggaatcaaccccgctgctactttgctctctgacttccagcttccagagccatgagagaataaatgtctgttgcttaagcccctcagtccgtggtacattgtcttggcaaccctagcaaatgaatacacagactatgtatcgaatattgaaattgggttttaaggcagtaataaggcccatgctgcttccttgaggaaaattcagccgcaaaagaggattcactgcttattaatatggagacacgttctaccagatagagctctgggaatccaggttctccataggcaagcacagcagtgaacagtttttccaaacgtctccttcctaagcagaaaggaagtgacaccattgtctgccatttgccattcagagctcgttaaaacctacagcctcacacccatcaccggtccacaggtaaacagagatttcagggcaggggaatactttggtgccgttattcctttcagttgccacaagtcagtttccctaaaggctgccctattagtggatgggtgggtgggagcctcagtgaggtatttcctgtgtgagtcaaagcctttcaaaatggccgtgaccccttgcagactctgaatgaaaagtacagattctcagttcccagagtttctgcatgtgatgatgaatggaagttcccgttgcatgtgggacaaaggatggctgtaacattttattaggtgtggcttttggtgtacacatggcatatgcaatatatgcattctcatcacatttagttttgaaaataataaaactttaaagatagaaagaattttctttgcagaacccttatgagatggaaaatattagtgcaacacagaagaagacaattcccgggcttttagccaagacggctagagagactccacttctctctgagtcaacacccaggttcctgccatggcctgcaaggctctaccacccccagcctttcctggttcacctcctggttctttctttcgctcctttccagtaacccctcctccctggctgttcttggtcccattgttcctcgtgcagcccccgcagtccactctggccttgttctagctgttgccaaggctggaaggcctattcttcatgaatgcatgggggctcacaccctcccctccttcgcgttttctcaggaccaccctggccactctaaatgaaaagcagcagtttacctctcttttcctgagtctctagttctgccttctgtttcttcatacttatcacttaccaccttctaaccctgagatcaggcttgaaaaacaaggttataaatttaccctatcaattattggttgattaattgattttcaaaaattatctgtggcttgtagtgctagaatacaagccttatgcagataggtgtctttgtggttttgggtcatggatgtaatctagaagcagctagacaagtttctaagtagaaaaggtgttcagtacatatttgttgaacttatgactaagagaatattcttattcctggaagatatgtgtgatttctagtggagactagaaatggcctttctctgaggcaaacttctaaatcctctgaataaaggtatctctagcccatctgactcagtcccacacccctgggctgtggaataaccagtttagggggtgattaaaatggctacataggtacagaaatgttaacttcaggttgtcagtgtagcagaagcaaagatgtttgtcgtgttgtctgtgaagacgtgctataaaatcgtcccccaaagtaaattgtaatggcaaccatgccctcagattgttctggaggatatagacagggaatcagacactactttcaaaactgttacataataaatcttacattggaaaactgtcttagacctgtttagaaatcttgcattctctgtcttagaactttccctcttgagctgataattatcatccagtaatgacacttatgtggccttgggaaacaagttattaagcatgcacctgccatccctccaaggcagtttcacccttcaaattaaatgcgctgcgcttcctggcagcgctgaggccattggagtggctcctgagtgatggcttggaagaaatgatagcctagtagagaagtggcccaggagagtgcacagaggaaagctgacatttagagaatgaggagagaaaaaggagggcataaagagatgggggatggaattgtcaaccaaataggaggaatagcaggaatatggaagccaaagaaaagagggttaaaaaaggggagagtggccaacagtatgaactgctcttgagtaggtaacaaagagaccagctgggagtgaatgtttgagggaaccccaaaaagctcactcctaatcgtggcaggacagtgtcagaaccagacggcaaggttggagaagagaagagagcaggagatgagaatctgttaaagagctgtgaaatatttaagtaagtaagtatggccaatttttggttccttgcatcaccagctaccacccccaccttcggacacccagaccaacacacgactcttgcttgaaagcaaagtatgaaggttagagacactgacgtgagtgaaactagactgaacgtttgcgagatcctggataaataaatattggatatttttgttggataaatattgcttggataaatattgcgaaagtgcattgtgattgcagaaatactgaattggcatcagattcattaataaaaattctgcctgacatctcacgtgtcaaggcccatgggagcctgactggccactacttggtgcattcttttttttttttttttttttgagccagagtctcactctgtcacccaggctggagtgcagtggcgcaacctcagctcactgcaacctccacctcccaggttcaagctattctccagcctcggcctaccgagtagctgggattacaggcacacgccaccacacctggctaatatttgtatttttagtagagacagagtttcaccatgttggccaggctggtctcgaactcctgacctcgtgatctgcccgtcttggcctccaaaagtgctgggattacaggcacgagccaccatgcctggccagtgtgctcttttacagggcccagggagctcagtgctccagtcggctggttttccagttcaggagcttaaggcttcagattcagcagtggcagaagtggtttcccaacttccagctgccctgttctttgcacttttttttatttttaagtcaatctaaaatgagtctgtgttcacaaataaatagcgacaagtgcaagtctgctagagtggaagagagcaagtgcaaattctctttccctttagctaagttgctctttgaagtaggcgtagccccatgacgctcccataaggcttactgtgcaggttggatgagtaggcaacttggaaggccccacctgctctgcaaggaggtagtcctgcacagcgcctggtggtcagatgtccactactcacctacccgcccaccccacaggtggctctgtgctgctcagaacctgcacagtggtgcatagcatttcccagctcttgaagcttccttttcttcctgggaaagatagatgtgaacatccatgacctcacttcctccacaaggatgaatcttaataagtaaagaggtccagtaaggaggcaatctaaagaccgaggtttagactctgtgtacacgtcaagatttcaagtcaccaggctgttgggcaggccttgatggtttggatatgaatgactctgcacactttcaaagagtatttgtgacttttttttttttttttgagacagagtcttgctctttcgcccaggccagagtgcagtggcatgatctcggctcactgcaacctctgtcccccaggttcaagcgattctcctgcctcagcctcctgagtagctgggactacaggcatgtgccaccacgcccagctaattttttgtatttttagtagagatggggtttcaccatgttagccaggatgttttccatctcctgacctcgtggtctgcctgcctccacctcccaaagtgctgggattacaggtgtgagccaccccgcccaggcttgtgactttcaaagtagacatatttatagaggggctcaagccagatggcaaaagagccctattggatgtgatgtaagtatgtgtagtttgaaattgttggagggattgctctcctagttcaaatgtattaggttttgaggtcagcactcccagagtcataaaaatcaagtctcactggcaaccaacttgttagtgcatgaaaagtgttaccaggacggggtctacccagtgctcatctatgtcataggaaaagcatgagctcagcgtataacattagcaaagggctctgatgacctggctacttagtcccctttccatgcagcaaccaggatatatttatgtgctggaaaaatcttctgaaaagcacaggcttagcatcccagccccagggagtcagacatcatcacttaccaagctgaagaaagaccttggcagggattggaccctcacagtgggtgaagactaactctttctacgtaagtcagcgtctaagaaaaagaaaacgtctgtgttcatgtctgcgttatacagtgtgtggcccatgccaacaatgatggggatggggatagaaagcaaaagaaggagacccctggaccatcatgtgaatagtggagacttattcatgtgctcctctgtctgccagaaccccagtttctacaagactttctgttggtattaccatgttgccatgtgttttttattttttaaatttttttatttattattattattgaagtgctttatgtgtagaacagatgccatattcccatgcaagagagtagatcctttccacacttaaaaacataacactagctctcagggtgctgactagcttcttaccattagcacagaaggagatacctacaagattgaggaaaattaaagtctgggggcagcagggaaagaccctgcagttagcatctaacctggatgcataggaactttttagcaactccatacatggtagatttctaccttatctgcatgtctgctcagagatggaggaggtagagactgcagcctggctatggctgaaagaggatgttactagttaaacaaatcgatctcattttggtgcaaaatggagtcttagaaaacatcagtagaccagaccctcattttagacgaggagcttgaagacttggtacatgaggggcacggagtggtggagccccatggccagtggccctgtggtcttgcggcttcttcttaaagtgcccatcctgcatcctggcacgtgcatgttgaacctggtgtgacacacctgtctgtggggaggggggggaccgtaccaattatttaaaaaattaaggctgttttgacacccccaccccctcacccccgtcttatgggaaattttgaattgagtgtttgaaggcatgagagtgacacctgatgaaaattagctaaaagcagagacagagttgtgggtggaggccaggacatctgctgcccctatcttttgcttgccagggttttccattgtgccagaattttctcatgaataaaattcctggaattttatcgaaaacaatgaatccatgtgtcagagattcacagatgagacacattccagatgcgtagcacactgtatttttagcctttgtgtgttttgaaagggccaagcataaaactgccgatttttcacggagctccttctgaagaggagagaggtggtgcaccaccccttccctggtgttcagagaaggaccatgccaatagaaaaaaagtgcaagcaactttgctactccttgagcttggcctttgtgtttctcaagccttgaatcacctgagtttcaacctgggcttgtaagtttcaaaaatcaccaggacagaatgatggtgtgaacctcttagccagactgccatggaaacacttcctcatagaagtttatgaaaaattcaacaatttttagggaaagttaacatagaaagcattatggattccacatcctggaagaaaagacttttcttcagaagtttgagggctatcaactttgtgccttgtgctattctaggtaaaaaaaaaaaaaaagaaagaaagaaagaaagaaagaaaaagaacattatgttataagaccatggtatatctattaatttattatcttgttatgtagagaataccaacagcacgctggggagtgtaccaggattcattccttcctgcacaaagctttgatttaattgacattaaacaaactaatgtagaatttgaatggaaaacccacaaaagaactggaccagggaccaaaaaggctataaatcaaagtgacagacgtgctcttgaagtaaaagatgctagatctcccttcccctctgttaggtagatacttggtttgaaaatccagtacttacaaaaaataagtgataatttgcacacaagagactgtgattttccttgcatctggcttgttagaataatatgactagaatggataattctgatggttcacatgcagaggtttggagtcagtcacatcacccttctatcatatgataatttaaatacaatattaagatttatgaaacctgttacacacactagattatttggcccatttaactgtcctgggagagagctgctcggcagctggttgccatcagtaccacctttatagttgaagaaattgagagtcaaaaaaggataatgcagcacttgttgaagtgagcaggcacccagctcacctggggaagttgttacaaagcagattctgactcagcagggctggagactcggaatctgcatttctggcaagctctcagctcacacttggggcaggaaagggttaaaggatttacccaggtgattcccagagcaagggcagagcccagcttgaaactcacatcttccatcttcagatccctatccctggctcccgtgctctaccagacggtctcctatccattggtacagcttcatgttcatcctccactgagtgattaaaaaaagcaaagaaaaacttctttttatctcaaatgaattatttaaaactagataaaaaataaggaaaagggttttgatgaatattcgtgagtaacgtataacagtgattagagaaacaaaaacaagtattgagtgtcaagagtagaaacagccctcttagaaggatgtaaaggaatagtgagtgtattttttgcacccattccaatgtaaaacatacaaacaggaggtttccacagatgtttttatactttttgctcatctccaaagaaggaaagaagcctactgggaagaaaaagtgattcttcttcttcttttttttttttttttgatggagtttttctcttgttgcccaggctagagtgccgtggcgcgatctcagctcactgcagcctccccctcccgggttcaagcgattctcttgtctcagcctcctgagtagctgagattgcaggtgcacaccaccacacccagctaactttttgtatttttagtagagacagggtttcatcatgttggccagcctgctctccaactcctgacctcaggtgatccacctgcctcggcctgccaaaatgctgggattactggagtgagccactgcacccagccaaaaaagcgattctttaaagaagaaaataagaagctattcacatcacaggcatgttgtttcttaaacagttaaatggcatttgccagggcaaagagtcccagttcattgtcctttcaaatgcattcgaggtttattctgcatggcactgagaaaacagagttgttttaaaatgatgttggttgacattcttgatctcccaaggctcatttaaatctaattttcattatgtggacataactattctttctttaacatttttctaccatgctccaatctttcacaatatttctagagtttctgctttccagattgaatgctccctccttcttttgcaaacgttcattttccagtaagtcttattttgttcataggttgcttagctataggaagtccctatttaagcctatgtggattgaaggtgaaactctgcaataatacgctctttggtagtatgactgcagacatattgccaatggcaattattttccaaactccctggaactcctgggcgttggctacacaatccattcatctcacaaaaacacgtctcttcatttggatgtaatagaagtttgtggatcccatttatagcattatgatggggctgtaatatcacctgatgtcttagtcctagggctaatatgaacaccaacaagcatttgaggttaagaaattatcttatttctagaggcagacatacagaggagccagccctgaaaatgcttatatttgaataaaggcaaggccaggggagaagtatgtgggcaaagagaattgctggcaccagccaggccttctcagagccctgagaaagtctgtgagtccagagccgggaaaattggctgaaggacatggaggggatggatccccagctaagtctgttctgaagggatgtgctgagcatagggaaaagcaccttctaggatgagagaggaaggagcagaggtgaaatgggaagaagccaggttctctgtatcttttaggcaacatttgccctagtggatatgattaaagataaagaatatctgaaagtcctctaaagcgttctattaataaagataataaggataaagattttcatctctccttattatcttagtatgtatttagtaatatgtatacatatgtatgatatttttgtatatacattatgtattgtatatctgcatgtatttctgtaggtatctatttgcatatatgcatacacttatatatgtatttgtgtatatgcatgtgcgtatctgtatatatgtgtgtgtatgtatatatgtatttgcgcatgtatgtatttgcatgcatgcacacatgtatatgtgtacatatgtaagcatgtgtatgtgtttgtatatctgtatgtgcaaatgtatctggacactagttctgggtctcatttcttagcactggactagtgttgtgagtggtgaaattatttgacactgaagtgataccatattggagaaatactctctttagatggacttcatttgcctacatacatttttcctttgaggttaatccaagattttttttatagttttgaaggactaaaattgcaatgtgttaaattagaaaaacgtgaacacaaagctagatgctgcatttaatatacgatgttaatacttccttctctgaagaattaagaagaaaagaaaatcatatcaagaaggggcaaaaatgatcatacccagctttgtgaagcttctttcacttaccacgtttcgcttttttgtgtgttgtaaataaaagacacactggtcagatgaagattcttgtttaatgagatactggtggcatcagaattgcaaaagtgcacacatttagaataaaaactcctgaaggactggagtatctttgtcaggcttatggtgggagagcagagctttctctaagtgcattgtctattttgtttgtgttgttttttcctcctccaaatacaattagatactagaccttttagaagcatctactgcatatgtgctgccttgaagagaaactataaacaatagagcctgcgacagcctaatagatagatttccaatatccttaggtctgcagacatccactaaaggccgcccaaagtggcataggctccagcatatttataaatggtactcctacctgtcctagttttcctgcatagtactcattaagagaaggcaggcatccacctgcaatgaacacatcccaacacctggccatgtctttgtgtctgaataatctgattaatcaaagaaaagaacaaggttgttgatttaagccattgcaaaagaaatgattaactgtatgcagggcccattgctacacatcccctaggctcatagaagagcatggtatacctagagaagtccttactggttcccagcactctccgtttaccatccagatcctttattccatcccagatccagggattctggacacttatcccttcatctttcttctgtctcttccctctaccagcctctctctctctgtctctctctaggtgattccatctctcatggcaagagcaggcaccaaaacactccaccgtgtgacttttcttaatccaacttcttccttccagtaacagccaggtagtggccagtctacagccttggggaatgattccattcacagacacaaaccctgtttctgcctcatcctcactgttgatgttacttctctaatcgcactttctgatgggtgggcaagaatcacagctgaccttataggacaattgtaaggattaaatgatcatttttcataaaatgtaagatgtcattggatataaaatgtcccattattttatctgccatcagagaagaagaaatgctgcctgatacctaggataagcctttcattttcatatttcagagctgataaaatgtgacaagtggtgtatcttgtaatcaacaaaatagaatttaagaggatattgcatgaaagtgcttaaggtaacctggtttatttggtggataagctatttatgaaagtggttaaaagatggcaatatagggagttaagtgatgtaccaaattctgcgtggttatatgtgagggaaatttaaggaagggttttgtattggattgtaatgggattaaaactgacagaaaaagtaggctattgattgaagatgatgctggcttcctaagtgaatgatctccacactgtgttgtgatagcagcaaggacttctttaagatttttttattttttatttcttattttattttatttttttgagatggagtctcactctgtcacctcggctggagtgcagtcgcgtgatcccggctcactgcaacctccgcttcccgggttcaagcaattctcctgcctcaccctcttgagtagctgggactacaggcgcccaccatcacgcctggctatttttttttctttgttttttttttggatttttgtatggtctcgatctcctgaactcatgacccacccaccttggcctctcaaagtgcttggattacaggggtgagccaccatgcccgaaccaagatttttttttttttaagcatgatcatgatcatacaattcttgttccacttagttgttccatttgtttttcataattatcaaataattatagcatataagacttgaaaacattgaaggtgggtttgataatccaattctcgagaggcctagttctggccatcttcctaatttttgaaaaccacgaaaggaccatggatgcctttgcttactccagatgtgaaattcacctgaccattcttaaagattttctcagtttcaacactttaccactcccaaattttcaaaagaggttaagtatgatggattctctgtattaacaatgtaatatttttatgagctataaggatcacaaattagaatcaattttgggcctttattttctaatactttggttgagaaataggcatcttgcaaagtattcatctgttatagaaaggcatcaggattcctgaaatactttgctgaaaatgtcagtatgcattcaactttgttagttttctttttcagtgttctaatgtattttggatccttttttgtactctagttacttgaaaatagatgcatattttagagttataatatgaaatataacctggtgggacctcccttcatttctggaactgttatcccatgaccaaaatccaaaggaatggtcctcatgtgttattggtatattccgtattgaaatgaaataatcaatactacagtactaacacagtagtaccttttgtttgggggtaatttgcttagaattatgtgtttctcgtaagttatttaaaaatgagcttggtagcctgccatttgcctgatgggaatatcccaactttcctggagctacagaaaaaaacaccccacacattggcaaacaccaatctaaagttcaggtctttttatagtaacatagaagcaggcatatgaaatgattatgccacatatctgccagattttgacgtttaaaatattctctgttataaagccactgaagcagatcccaagccttgtggctggccagagtttctgcaataacaatctatacatgctaactaaggcagctgcctaccttggccggcaggtaggcaggcaggtaagtaggtaggtgagatctgctagttataaagaggaggagccaggctgcagggaaggagagacatgtcagtcaaggccaggaagtctctcccagagctggagttaaagaactcatgtggtcctgattagcagcctgtgttcagcactctttttctggttttaatcctactgggctagatcctctctcccctttgaagtcacagggctgccaggcagggagggccctatgcagcagcgtgtgtccattcaagctttaaccgaagggatgatgaaacctgccaacagccaagtcaagtgggaggacaaagatgtggcagggctgtgccttggtttgcttctgaagagcagcacttaactttagtgaccgctgttgtgggaatgggtctgtgaaaacccctcagcttcttcttactcccaaaatgtgtatgtgagagagattttctttattcatttgtttccttttcctgagctgtacttcatcctaggtgttcagcagcctttgttgagtgacaatcaacaaagtctttggggcatagtttgggttgctctgtcttttcaaaatgtggactgtatttcacctcttttgaagtgtttatcctgaagcttccttattttcagaatttttcccttctaatgaacaaaagcaactgaggggttgctttcaatattctgaattatattcccttcctcatttttgtgcaatattagctgtgagaagaattttaagatgcaaaaaaaggaggcatgcctcccccatctctagcatttctgagggttttttccttcctaaatcgatctcaattaactttgatttctttctttagaaaaccatgtgctgaaataatgctttgccagatgtgagaatggattccttcccctacaaacacacacttaagcttcattttagttctaatattttggtcttttttttattattcaaacttacactacatttttgtggctattggctttgtttgcagaagtaagcttactttatcttggagaaatactaatactttaaagttattgcttgtttgttattgttgcagccatttcctttttagtttgtaattttaaatttagcctgtttcttatatatataacctgttttcgccaatttctgatataaatcacacatttgttcatgtttctcatcatgggtgagccaaagctaacattacatagtgtgttattcccctgcgagccttggtcgagtctcaggcccaggaaggagagaggcagcagccatcagctctgtttcctgttctgagcctgtaaaacacactagccagtgccaccatgggaagggagtatctgttttgcaaaaattttttaataaggtctaatttttgtcttaattagcatgactaagtctatggtgctgattttactttgaaacccacatctatgtgtttagattccttgttttggccactcaattgtgactggaagagaaagccatgaatttcaggttccctaacatctaggatgccgtttctgtactgtcaacttctgtgtcactgcctcgtatcatttttggttgttgatgagtttgattttgctgtctattcaagatgacttttttcccttgtgcctgattctggttctctgtctggcctacctgactctttggtacattttgcattactgtttggacagcaggcttagtctttcccagggtgtcacagggctgtaattctacagatacttatggagtccaggatgggggcttttgctttagcacagacacctgaccaccactttgagagacagaggtttgagtttgttttgattcttcctccttgctgattctcagtgccgtgtgtctggcaaagaagtttgtgcacttgggaagctaaggaaaaaacttggtcctgggacaggtggaggatcgagcgacagagtagatgtggagttgggggtgattgtttcctaaaaattctgatccttctgggtggagaggaagctctccatctcagaagggctgcttctagggtgtgattactgatgggaagcacccttatttatgtaaaggtcatctcagagaaggggaagagggtgctaatttaaacacatgtcccaaaggaaaaaaatgtcacaaagggcatcatagggctgtgggggcaaggagaaggcagatggtaatacacaagtcattcccatcactaatcccctggttgatcatggccagctcattcaagattagctctagacctttctgggtctcagatttctcatttggagatgacaagtttggactggaagggtctgcgcagcccacactcccctgcctcccctgctctgcctccaaagttcttttctttttctttttttttaaataaaaatgtgtggcccaactagcctttgcttctcactagttgatgtcaatactgaggatgccaaaggactaatataaaaatgagcattcatgtggaattctttttgtctgttataagaaccaaaattggattgtatcacaacagctctgtgtcattgcagcacaagccatcatttaagtcgttgaaatttcccaaacttgccgttgctcattggctgtagaatataaacatagccattggctaaccacttgtttgacttaaaaccacgaaaaatgattgatccaacaatgacaaattgctatttcttctcaccaaatcatgcaaaagagcgaagatattaattgaaagtaaggggaaaaaagagcttgtcagtgatccagatattttaaacatcctgctgtttggaagcatctggatacttcacagctttttttttttttttttttttttttttggttcatttatcatccagatgctcaccatcatggaagcaccacttgaaactgtacttcggctaataacttagagtggaaacgtttgtatctttggttggttgccctttggtgctccattgatccctctgtcttcctctaagtccctcttccgcaaaatccccaggaatgtggcaattttgccagatgcttaggtgttggccttcagatttcttttttttaatcctcatgaccgctctgtaccctgtctgcttgaattatagattgcatttgtcaaatagtgacacatgcaattggatgtcttctaagacctttgaaattcaacttccttaagttgagattaaagtggatattctgctgccctgccacagtcaagcctgggatgcttcgagacctgcataaaagtttttctaggctggcatttctaactcttactgtcccgaggaaagaaaaacaagctacttttttcttctgaaaggtagaaatggagaccataaaaacgatctaaaatgtggtcccagttagaaaggactctgaaatcaacaactttttgaaacatgactgtctgttggagtgtcttgaattatgtgtttctttgggcattcaggaagccttatcagttgtgagtgaggaccagtcgttgtttgagtgtgcctacggaacgccacacctggctaagacagagatgaccgcgtcctcctccagcgactatggacagacttccaagatgagcccacgcgtccctcagcaggattggctgtctcaacccccagccagggtcaccatcaaaatggaatgtaaccctagccaggtgaatggctcaaggtaaggagacttccgcccctttctctccctgacctcccattttcctatcctttgcaaaggcaaagtggaagtcagtcatgcttctctaaagattgacttagaaagcaaggccactgtgcctgtaatcccagctactcgggagcctgaggcaggagaatcacttgaatccaggaggcagaggttgcagtgagccgggatcatgccactgcactccagcctgggcgacagagcaagactctggctaacaaaaaaaaaaaaaaaaaaagaagaagaaagaaagaaagaaaggccattgaacggtgacgttggacagcgctgggaaaatgtgttctccagtggtttgtgtagaggatggagtttgtaaaattagtagtatatttaccaagaactctctttgaagatgtgttcaattctatttcccaggcacgagggctctgtgggaggggagccttgcccacatatggcagaattcatctgaggtttgattgcctggaaaataatgccgtcttatgttttcacaaagggagagtgtcagctagtggccaggcagtgcggcgtatgtccaagccacttgaatttgctagtggatctccattgtctgccctccaccctcaccccaccctctgatctctgcggtcctcttctcttaatgcctgctgtttgttttttttttttttcctcctcttagcttacacataaagccctctccagtgtctcccataattattagcttccctgagtttgtcatgaacatacaactgtcacgtaaaatgtattaccaaatgcagaactgtccctggccctcaaaaagtgttgaattctgtgtagttttgaaaagtaaaattaatttcaattatgatctaataccccatatatattcaggaaaaagaatatcaaatcttaggataaagaacagattatttcttcgaaatgttgcataatctaccatcaggtcataagaacagctcacattttcggaaactttactgtgtacaaagcccttttatatccagtagcccctcagtcctccgagcagcccctcatgaagtatacttgaccccatttgatggatgaagaaacctgtgatcaggcatttccagtctgaccccaaatcaccacttaaatggaatcagagtttggatttaaaccaggagtgtttgactccacaccctgagcattttccactctgttgaagctgtaatggggcctttttgttacatatatgttttaacgctaaaaaggtttattataagtgtcatagtttataagtctggaaacggttgcgtcaattcctagtgtggtgttaatgaaggtgccaagtcacagtgtcctagagggaatgtcaacggcaaggctggacgtgccagatggggagatgggagatgccagaacactcctccactctgagaagtcagtttgcgtctgtgcatctgcttcttgaaagtgcactggctctgatgctacatattgccaccgcactggtcctttaagtggaactcgaggcaggcccatcttgaatctcatcaggagattcattcctggagttacagaaggacctgggtagaaaatgcaatgatgggtccaggacaccaaagttgtgggaaattaatgattacatgtaaatatttttgaatctcatcaagagattcattcctggagttacagaaggacctggatagaaaatgcaatgatgggtccaggacaccaaagttgtgggaaattaatgattacatgtaaatattttttacccataaatcctatgcatttgatacaatgtttctgttgatcattaactatatatatttctgaaacacagaagaatgcagggtaatcatgttctaaagaatgcagcagtgtttatgcagtagatcagttggtggaacacagcctggaaacactgaatgaattctgttttgggtggggtcatatgatcccatatatgccagcgtgatcacggcggagacactaagaccgggacacatttctaaagcttttcttctgcagaggctaatttctacctatgagcaattcacctgcagggaggagggggatgttggaaggtggggagagaggaaggaaacatctcagacaaaagggcactgagatgatttccgatggacaacaggcagagtgagccatgtcctggcccttgtttgagagtctggcctggggccagtctggattcagcaagcctccgaagggagactgagtgaggaggcgagaacagtgctccagaaatgaaagtttctattgttctcactgtgttactcccgaatttaaaataaaataagcattctggccgggcgcagtggctcacgcctgtaatcccagcactctgggaggccaaggcgggtggatcacgaggtcaagagatcgagaccatcctggctaacatggtgaaaccctgtctctactaaaaatacaaaaaattagccgggcgtggtggtgggcacctgtagtcccagctactcgggaggctgaggcaggagaatggcatgaacccgggaggcggagcttgcagtgagccgagatcgcgccactgcactccagcctgggcgacagagagaaactccatctcaaaaaaataaaaataaaaaataaaaaaataagcattctgtttgtgggagaagtgcaaacactgttttccttagtgtgagcctgtgatgccccttggtagctgatgtctcctctccctcctggccaggcatggggaagcttttccagcctgtgttgtgaccccaggggtacaggttgggagtttggggtaaccctgagccccaggcaaggggctacagtctataagaaagaaagacaccaggagcttcagtccataagaaagacaccagggcagttccgccccagggccctcagcgcagcagactggggaaagctcttgggtggtttttctgtcaggcaagtgaaaggctggtgctgcgctgagggtctctttccgggaaacatctttttcaggggaactggacattttctttcttttttatttttcttttagatggagttttgctcttttttacccaggctgcagggaagtggcacgatctcagcttactgcaacctccaccccccggggttcaagcgactcccctgcctcagcctcctgagtagctgggattacaggcatccgccaccatgcctggctaaattttgtatttttagtagagatggggtttcaccatgttggccaggctggtctcgaactcaatccacccatcttggcctctcagattgctgggattacaggtgttagccaccgcgcccggccttgacattttctttcaaggaaacaatgggaactttaagagttcctctctcagggctcatagaattctaacattgcccagattgctgccgtcataaactttcaatgctgttccagctcctaaagcatcggtgatgtgttttggtgggtggataccgagtgaagaccatcatgtcatcctcttcatcctccgggtcctccggtgggttcggtgatgtcggtttggcaggtgctgttcatgaagggaacaaggtggacctcatctgccttcaatccaggcctacgtgcctcctttgaggaaaagggcagctgggttgtaataggcaggggaggaacactggctgcagaggctgcctccgctttgaggcatctagcaatgtacagatgtcaaccagtcaccaagtgtcatcgtcccctacccacaaggatgttccagggggagggagaggagtggctgacactaatcccctttgtagaagagaaagatacagagctcatgcccgtctcccccagagctcagtgtgtctcctggcattgtgtctgggtgctggcctggtgtatcagttgggattctctagagaaatagaacttataggatatttttacattttaagatatttatttgaaggaattggctaatgcagttgtgggagtgggcaggtctgagatctgcaggggaggctggcaggctggaaagtaggcagaatttcttctgctctggaaaccgcaggctttgttcttaaggccttcaactgattagacaaggcccactcacattatctgacatcatctcctttagtcaagttcaactgactagctacctgtgcaaatgccttcccagtacaacctcagttagcatttgattaagtcactgggtgctacggcctggccaagttgacacaggaaactgacccccacacctgacttccagggatgctgcactcatcagtgactggtgacccattgtactttttagatctccaaaccagtgtgctctggggggccagttcaccgctgctgctggagctcagcctgactggacagcgggtggtaaagggggtggcgtgtcaggtcagaggttcactagggggctgctcaagctcagtgatctgaaagaattgaaacataagtggtgagtcagtgttctgctattaacaatccaacgggcttcctgaaggggaatgggggaaaagaaagctgaacagttatcagtggagctaagactcatctcagccagaggttggaggcagccttggggcagacaaaggactgcctgggatcccatccgcaggctttgctgactcactgtgggcttttttttttttttttttttttttttgagacagttttgctcttgtcacccaggctggaatgcaatggcacaatctcggctcactgcaacctctgcctcccgagttcaagcgattctcctgcctcagcctcccgagtggctagttttcatatttttagcggagatggggcttcaccatgttgtccaggctggtctcgaactccttacctcaggtgatccacccgcctcagcctcccaaagtgctgggattacaagcgtgagccaccatgcccggcctcactatgggctctttacgaatgtcaggtgcagctccataaaagggaacatgggcgtgattcactctgctttattttggacaccgtgaaccagcaccgggctgtgtcagcccagctcgaggggccagggcagaggcagggttcacggagacgcagattctgccacggaggggctcacagatgagatgctgcagagcagtgtgtggctgcctgcctctggaggagccccgccaggagtgcagctcctcaacgctccactacctgcacctgcatccttccagactcggaagccccaggccagctgtgccagggagttagcccatctcctggcccctggcccaatagcttcttctaattgtccctcctcttagcttatgcataatgggctttcctgtagtgcacatgccacttgaagtcaagtccaaggggaagttacgtaagtcaaatattactctttggctagaacttgtgggctgttacctttgtggcccctgactatcttgcagacacctccacgggagaagtgcactctctgcagcttaggtctttccagaacatggcccacctccttctgcctagaatacccagcttgggaatagtgccctctgtccatccctatccatccagtacccacggagaaaaaggccatgtgctttgagagaaaggaaggacttagttcccaaccgaatagtggaattctacaaaacctcagtcctaacgtgcttacaagctcctgaaatgaaatacaagtggtgaaacgagatctgttgccattataatagagtttctgtaaagcataataaaagaaaaacaggagagaaaggaaccactgctttgcgagccaactgggatgtccttgtgggtttggcttggccactgccagatcaaacagcagcattcttgcagacagtaatctaattgcacgttgtgtagacacaggacatcatttttcagcttcggtggtccacagccaccctctccctttcttcactctagcctcacgcaccagaaagccccaagtgttcacacaatggagaactgtcagtgtgtggccaaactaaaaccagctgttttcctgtgccatccacaccaagggcctggctgggagtttcagcgcctgctcagcctctcgtgagctccctaccaatgccctgaatttgctgtgaggtccccaaagctcaagtcatgatagactagcaggataagccaagaggtaacacctgctcactcatggtccacaagcaaactgtcttctcgtgagcaggctggcaggtctgtgcagagcaggctgcttttcctccatctgagcatccccagctcaggccagccagatcacaggcagcttacactaagtggcaccttcccctttccacaggcgatggcgatttcgtgaagcccacctggaggctcactgcaggtggaactcagtcaatttatgtgccatgctgtgagtcccccctcagcccagtctgcaggccacctggagccattgccatgtttgattctgttgagtgagggttcccccggtgtggtgattctcagcgtgggctccgggaccagcagcatcacctccacctgggagcttgtttgagatgcggcttcttaggccctgccctagaatcggaagagacctgggtggcagcccagcacgctgtgtttgaaggagccctctgcgggattccgatgcctggtagtctgagaaccactgctctgttgcacgatccaaggagatgaaaaatgagaaagcccagcagctgggtaaaggtgacccacccagcgaatgatctgggaggatctacgcggaggtggggttgttccccagaagtccttgcctgagttgagaaatacctccttccctcccgccacattggcgctttgcccagctgggcctgtgcagcgagagacaatgctatctgggccttgcctctctctgggatagattcattgcatgccatgaataactccagcctcgggtcagatagcaggatgttttatagatgttatttaaaaaacatgccatttgtcatgtgatggagatgagaaaaagtagggagtatctgctgggtccatcagggccttagacatactgtttatgcgtggagtcattcattcattcaatgaatatttattgagcacctactttcctagtctcttgggatagagtgataaaatatacaaaaaagttttgcctcactaagttcactttctagcagtgaagatggtcatgacatcagaccacttatgaaaacacagcaggttagatcatggtaaatgctaaggagaaaaataaagacgtgaagcggatggcagctctaaagaaggtggctggagaagatcacaaaaaagtgatgtttgagtaaagctgcaaaggcagttgagggagaatgcccgtgattaaacagcagaaaatattccaagaggagggaatgctaaatgcaaaggccctgaggtcagcttgaggtgttcgaggacaacaagcaggccatcgtggctgctgtttagtgtccaagaagaagagtaatagatgatgagtttggagagcccgtggggccattgccggactttgactttcactttctggtgagttcagaaatcattaggggacttgaggcaaaggagggatatagtgttacttagattttgcagggcctctctggctcctgtgttgaagtcttcctgagaaaatgtgggtgtaggatgggagacatctgcgtgagagtgggtgagagtggtagcaagggagggtgggagaggcagtcgcatcctgggtatagttggaaggtggaattaacgtgctttgctgatgggttggacatatggcatgaggaaaagaggaagcgaggatgggccaaggcttggggaatgtaccccaaacaaggtacggacaaaccataactaggaatcctcatgagcatagaggcccctttaagggccccttttaagcatcaccccagacactggggacaggaacttctctctaataaacaccaggtaaaacaagaggctcttgcctccttgcctgagctcagtggatcttaattcattagcccagtggttctcaaccatcgtgatgtggcccccagaggcatttgccaatgctcgtgtttctgctggtcacagctgggaggtgttactggtgtctggtgggtagaggccggggacatcctgcagtacacagggcagcgcccctgcagcccccacccccacctgtccaaagagtgacctggctccgagtggcactagtgtcgaagttgacaaatgctgcaggaaaccaacgtgtatttagtgtttaatctgcatcatggactgtgttagcttcgatggagatggattaagaattaagtgaagctggccgggtgcaggtggctcacacttgtaatcccagcactttgggaggctgaggtgggcagatcacttgaggtcaggagttcaagaccagcctggccaacatggtgaaacccccatctctacaaaaaatacagaagttagctgggcatggtggcaggtgcctgtagtcccagctactcaggaggctgagacaggagaatcacttgaacctgggaggcagaggttgcaatgagctgagatcacggcactgcactccagtgacagagcaagactctgtctcaaaaaaaaaaaagagagaaagaaaaaaaaaaggaactaagaggagctcatggtctaccaaaggtgaaaaagattctgtgagatcataagacacattcagtacagagcgatgttcagggcccagcaataacagatatgagggtaccatcaactctacctgggcaggagaaaaagaccctgaaagggataatattaacccatatttctaaaacccacatgatttattaatagattttggtatacaacatattgtccagttttctcaaacatctatgagatgacattattatgattattcacatttacggatgaccactgagtttccaaaagttttcgtcacttgctcaagtgaaagttagtgaaagtgaaagttggccatttgaccacaggcctggactcttcttcactccctcagggcttcttagaagaagctgaacgtctttcctgcattgagagggatagcaaggttctctccacgtgtcagacaagcagtgacaagatgcaccaaatccaagtgccaactgcattttgattttttgtatatgttacacattttagaaacatttattactatcttactttatcacatcaggtcagttcacctgcactcacctttacattaacctcaccaggtgtttccaaaacaatcacattttaaaaataataggtgggtcaggagttcgagaccagcctggccaacatggtgaaaccccatctctactaaaaatatatattaaaaaaaaaattagccaggtgcctataatcccggaggctgaggcgggagaatcgcttgaacccagtgggggcggaggttgcagtgagctgagatcgcgccattgcactccagcctaggcaacaagagcaaaactccgtctcaaaaaaaaaaaaaaaagaaaaaaagaaagtaaaattgttttggttaccaggattcacctggcctgttataaaaacatgaagcaccatactggctattgggctcaatcctttcttctctgaaaaaggagtctttcagacaaattaaaagacgtgcacaagatagaaaagatgtcacatctgatctttgtcatgtaactgcttgtagagatcttatgctacagaacattttgttttcaaatgatgaatcccaaaatggtgcatttccctccagttttcaagatctaaaagcaacacggtcttgctggcattcgtttttggctgtaaagagaaatataaacttaaataatgaaactttctcagggaaacatcgagcccctttaaggggacaaagaactaactgttggtgagctggtggtgactttttaattaattttgtcttcaactgcttcagggaagggggagggaacaggactgttgggaagaggctgaaattccaggtgtaagagagaatatttagtaagggtaaaaataacacacagctgtgaagacaaacatctacggtttcagtttgagcccggagttctacatgaatcactgctgagctccacccgctgctccagccatggggtctgaaacagcttttccactgcctctgattcagaaataaaacagacccacaaattaccctgcagcgctccagacaatcccctccttgtctggggtcctaaaaataccttttgtggtgactgacctccgattcacactatgaaacttgattaggagcttgctcagtcgattaggactaagtatatgcttttaggatccttatgaagaaaaccacctgagaagggatttatttgtattcagacttgagacaggcctggaatgcttgtcccgggccagcctccttgtgggggttctctcgcagaactgacccctttgccctcttagggtagagctgccaaagaaagcctttccatttcttccatgtggcttcctcaccaagttcttcttaatgtgaactaacctaataaaccaaaaggaacattcagaaagacagtgacattccaaaaagcagttgcatgctgaacactgcacaatagtaaaccttagcttcctgacctacctaagagttcaccgaggtacagttatgaacagttgccaagaacaaaaagcctcacatttacacccacatacacgcatgcacagccatgcacatgcagtatgttgctgtgttaatctgtatagtgcttcacagtttgcagactttcttcacaggcatcatctcagggatgtcctcacagcaacctcaagaaagcatccattcatttttatgaatgaaggagttgagcctcgaaaggttaggtgacccatctaaggtcaaccaaggtcagcaatggttttctgactgcaacacgaggggctttctcttgcactgcaggtatgagataaggaactcaatatttaaatggaagattcattcataaatgtactcactcatcctgcagacacttactgagaaaatacagagaatggtgcaattggaagggagacattcctctctggcggcccaggaaaggcttgtagagaacctagaggtgagcatggacaggtgaatagagcaggtaccaggtggtgaacaggtgaatagggcaggtatcaggtggtcataggccttgaaggcagagggagtagcaaaagtgaaggcctgaagggaagagactagggggtgatgtggaatgtggtctttgagcacagagcacatggagttggggagaggggctttggctactcaaatgccagccccatgttaatagagacactgatataactccagtacctggggcagtgcttggcctagaaagatgctccacagatatttgctaaacaaatgagtgaattgaggggctccagagccagatcactgaggagaatctagggaggggctctgggccatgatgggggttaggttggacatgggcagcttgcatttctgtttgggggagagcactctggtagcaggagggagaaagctttggaagagttcggggacatttcaccagcatgtgatggagaacaaggggttggaaagtcgtgtccaggtgcaagaggaattcagaggattaggaaggaggatggctctagaagaataggtagattttcgacaggattagcgggtttgcctccactgactcaaagaagaagacatattgatttccgcaattacattctgacttgccttggactttctccaaggagtgggcccctgctaagtgttctgaagtgagggtgaatcagatttaatgtggccagcgagcttggggctgcccctctgggatgtattcagtgccgttcttggataaatgaggcccattcacactcacaagggctgaggctccatgcttgtcaagctaatggccacggctgtgccatttcattgcgggttctttccatgacggaaattgcctcgctgtaagtagactctgatgtgagaaaaccaaagtcagatgccaagtttattttgtttttcaaagactaaagaccaaattttacatttctcagtatgttttttcagtaatattagtccccaccaccaaccccgctttttttttgtttaaggggtattatgtatggacgacagctcaaggaggctttcatcttggacttattttatttaatcttaaaaaattagattgactgcttccccagtggtccagctcctgtcctggtcctcacctccatctttttgggcctgcagtcagagtcagatgcactcccactcggctgtctcgtcatggggactttttgtctggtttccttttgcacttaagaatgtttgcccatcatctgtgtaaaacatgcaccctgctgggcacagcaatgaagttttggggagaagcatagaacgcttaactgcaaattgagatgactatttcttttagaccaaacttatcaaaacctatttatatctctacataaacattgccaccttccaagtctcccacggggccctgccttgctccttcgtggctgccctgctcagctcacgtctgtaaccctcatccatgactgtcttcagggccactctgaagatgttcttttagaatacttaatagtgatgaaattaagttttctgaggatccattcaatggtgctttaggtctatgaaagactcctcacacggatttaccaagcaagggcatagagtggggcggtgaagtacttggagtcgagaccatgactatctaggttcaaatcccaattcttccactactggctgtgtgatcttgggcaagttatccaacctctctgtgcttcatctgtaacaaggctcctgctttcgagtatttctgtcatggagatgtgcagatgaaatgaactaacagcaatagctgacacctggcgtggtcatgtgccaggcaccatgttaaatgctttatccatatgtttattataacataaacacgtggaaagagtctggagccatgctcatcattagtcaacagtgaaatactggttggaagattaaccaactgaggcctggaaagagttgtttacccacagtgcatttggtgctcttgggagacataaacatgaccctatttagtgttggtaaatttgaatttaaaatctagaaattaggggtttcagtgcagcagctcatgcctgcaatcccagttcttggggaggctgaggtgggaggattgcttgaggacaggagttagaggccagcctgggcaacatagtgagaccccatctatacaaataattaaaaaacagctgggtgtggtggcacgtgcctgtagtcccaactacttgggaggctgaggcaagaggatcgcttgagcccaggagtttgagactgcagtgagctataatcatacctctgtactccagcctgggtgacagagcaagaccctgtctcttaaaaaacaataaaatcaaatcaaatctagaaatttgggagttatgaaactagaggcatgtataacactgcatctctcaaggttttctccttttttaattacacgtttttttcatgtttttgcattgacttctctgacaggtctgatctttccaatggcagccagtaaggaggagaggctggggacatgccgtctctcatcctctgtggctgcagcatgtgagcactgtgtgcagggagcgtcctgctctgccaccagctacgcctggcacggtgcgggatggtcttagatgtattatgagatgttgggaacgatattgtttactgcataatccagttttcttcatgagaagccccgagaaaaactctcaaagcttaacccagggagagctttatttctgctgaataactggtttgtatgtagcttattaatacctcaaaccttgtcatcagatgcacttgtgtctttgctttggctagtagaaagctcagagttgaattggtatcctacctcagcaggataaatagtaagcttactcagtgggctgctttcatctcttaattcctttttggcccttgtttcctcatttttattctgttaattatttatgttatcattttgtcttatatgtatttttataagccaccccaaacttcacatagcttgcacacaggtaggggaataatggctatttaaaaccactatacatatttataaatagaactctggagttgcagaggaaaattacgaagcccctccctaaaaaactgttaacgaagctaaactcttgttcatccaagtggtttccagacagtcatgtctgggggcttgaaaatggggcttcttccagccctctgattcagtaaccctatgagaacccaactgggcttagcaacgtgtctgccttctctccttaactcaaatttaacaaaatttccaatgtatttgatattctttgccgtgtccttttctcattaattcagaatactagtatgttttaagaagtcagtgctcatgattttaaatgattagaacttaattctccaactgctgtttaagggagattattgtttgaagctcaacaagccagtttcattgggcacgtctccagttactagaagaaggacaccagcattctggttttttttatttccatcatgaatgtttggttgtcttcctacactatttctgtgttcctgtgagtgaccacagttatgaccaaatgccatggaaaagtgtgagattgctgcagaggttacactcctcaaggagtgtggcctgtagtcccagctattcatagggaggctgaaccaaggaggattgcttgagctcaggagtttgaggctgtgtggccccaagggtgttgctagggagttgtgaggtgttatggctggctttttaatatcccagccattgggctattgttcagttctttctcagaattctgaaccagccccccacctcttggggccccctggctaatgtggaatttctgctgctgtgagcagagggaagtatctgtcttcccagctcctgtttactcttgttgatgccacatattgcataggactgtcaagactaatgtctgtgggtgacaaatagaacctggaactgaaaatgtaaatttgagaataacagttcatgaccaagaatccaaaagcaaatgcaacaaaaacaaagataaatagatgggacttagttaaaccaaaaactttcttcacagcaaaagaaataatcagcaaacagacaacccacagagtggaagaaaatatttgcaaactatgcatttgacaaaggactaatatccagaatcgacaactcaaacaaatcagcaagaaaaaaataaataatttcatcaaaaaatgggttaaggacatgaatagacaattctcaaaagaagaaatacaaatggccaacaaacatgaaaaaacactcaacatcacttgttatcagggaaatgcaaatcaagaccacagggtgataccattttactcctgcaagaatggccatcattaaaaataaaaaaaaaatagatgttggcatggatatggtgaaaagggaacacttttacactgccaatgggaatgtaaactagtacaaccactatggaaaacagcatggaaactagtacaaccactatggaactagtacaaccactgtggaaaacagtatggaaaattagaagtaaaactaccatttgatccagcaatcccaccactggttatctacccagaggaaatgaaaaagacacttgcgcatgcatgtttatagcagcacaattcgcaattgcaaaaatgtggaaccagcctaaatgcccatcaaccaatgagtggataaagaaaatgtggtgtgtgtgtgtgtgtgtatatatatatacacacatatatatagacatatatgcacacacatatacatgtatacacacatatatacatatatacacatatatgtatatatgtacatgtgtatacatgtatatatacacatatgtatatatgtacatgtgtatacatgtacatatacacatatgtatatatgtacatgtgtatacatgtacatatacacatatgtatatatgtacatgtgcatacatgtatatacacatatgtatatatgtacatgtgcatacatgtatatacacatatgtgtatatgtacatgtgtacacgtgtatacatgtatacacacatgtttatatgtgcgtatgtacatgtgtatatgtgtacatatatatgtatatgtgtacatattatatatgtatatgtgtgcatatgtagatatacatatatgtgtatatgtacatatatacatatgtatatgtgtgggtatatgtgtatatatgcgtgtgtgtatatacacacacacaccatggaatactatgcacccatgaaaaggaagaaaatggcatttgcagcaacttggatggagttggagaccattattctaaccgaagtaactcaggaatggaaaaccaaatattgtgtgttctcacttataactagaagctaagctatgaggacacaaaagcataagaatgatacagtggactttggggactctgggggaagcatgggagtgggtgagggagaaaagattgcacactgggtacagtgtttactgcttgggtgatgggtgcaacaaaatctcagaaatcaccactaaagaacttattcgtgtaaccagacaccacctgttcccccaaaactatttaaattaaataaaaagacaaaatgatttttgtttgtcctcaaaggagtctgtgagagcaatatcttgaaccacgcttatttgcaataaagaaatttccaccccaaacaaaaagacagatacatttaatatttactaaatgattatctgtttgacaggcacctgctgaatagcctgagaatattctcaggaactgctgcaacacacatatgcaagtatgtgtatgtttaaaagtatgtgtatgtttaaaaggtaactagtcttcatttcaggaaggcatcagggactccctgacccatacactactctggtttaaagtgtacattgcagcactcatcctgacacactgtcctacttcaggactgttcattccctgcacagcatactctttgtcatgtgcacaataaaacaatgcattgaacgtccaaatccttatcatgtgagaatggagaacacgtggtcctctatgctgggcagcgcttggtgcaggtgacataccaagctgtttgcgggaactttttcccggcgatgtgtgagcctcggaatgcctggtgaaggtggggttgcagtggagtaatcaagacacacatttgtgcagtgtggatcttttcttgggcacagagctagaaatgtatttatagtgagactttcaaatgaacacttttcagttctctgaattgtgataaaatttccttttctttttttctctcttttgttttttttttgagacacggttttgctctgttgtccaggctgcagtgcagtagcatgatctcagctcactgcagtctcaacctccccaggctcaggtgatcctcccacctgagcctcctgagtagctgggactacaggtgcacaccatgcccgactaatttttgtattttttgtaaacacatttttcatgttgtccaggctggtcttgaactcctgagctaaaacaattcacctatcttggcctcccaaaatgctgggattatatgcgtgagccactgtgcctggcgtccttttcttaagtaaagcagatatctctgaaaattcttttcttctccaggaatcactcctctttcttatttgcatcttgtatatgtgccctgtttgtgtcatgcacatgcttttcagggaatgaacagtcccagggtaggagagtatgtcaggatgagtgctttagtgtacaccttaaaccagagtagtgtatgggtcagggagtccctgatgccttcctgaaatgaagatctagttacctttgaaaagacattgtcttgcctttactttgtggagtcattctgttcagggttaagaagcagggatggagagttcgggccacccgcactgaagtctcattctacctcctcctggctgtgagtcctggagccagccccttgtgttttgagtactcagttcacacctctggaaagtggagacaatgccagcaacacagttcgctgtggtgaagactgataactattaagctcccaaaacagatcccaaacatgttaaggctactcttttgctgttaaaatttgcaagagaaacctgggtgaagtggctcacgcctgtaatcccagcaccttgggaagccaaggcagaaggatcaccttaggtcaggagttcgagaccagcctggccaacatggtgaaaccccgtctctactaaaaatacaaaaatcagccaggcgtggtggcaggcgcctgtaatgccagctacttgggaggccaggctggtctcgaacacttagcctcaagtgatctgcctgcctcagcctcccaaagtgctgagattacaggcatgagctgccgcaaccagcctgaaggatctactttaatgtcacagagaaactcttgtgatctatgcctagagttcttgtcctcggatatgaaaattaaactagaaagaactaaaagaaaatgaaaaaggggttggtctgaagggttcaaaatcctcaatgtcccctgtttctataattctttttttttttgacatggagtcttgctcttgttgcccaggctggggtgcaatggcgtggtcttggctcaccgcaacctccgcctccctggttcaagcgattctcctgcctcagcctcccgagtagctgggattacgggcatgcaccaccacgcccggctaatttttttttttaagtagagacagggtttttccatgttggtcaggctggtctcaaactcccgacctcaggtgatccgcccagctcggcctcccaaagtgctgggattacaggcgtgagtcaccacacctggcctgtttctataattttatacatctctttgatcttttacttttcaaattgttaactgcgttgttggagaagaaagaattgatgggacctggtatacggccggcacttgataacagctgtctaaatggatgagtgaatgattgaatctgaacaaaggttgtctagattttatagttgttacttgagttactcacatcatctgggcaaagtctttttcctaaagaacctaatccctctaacttctcttccctggtaacttctctccttgagacaaatataccaaaacatatacactctactcaactgatggaattttccagaggaataggaaactcagtctaagtgaagacactctgtgttttcatattaggatgggtcttttagagataaatgtgtgaagccaggaaaaatagcatcaagaggaaataatgcatgtgtaggcagcggtggaaatattcaggatctacttcatgggaactcagaccattattattttaaaatttccttcatgttagcacagctgtgaggatgccatcaggcagggctgtgcattccaggcccatgttagggcctgagtcctgcgtgaccctgactgtaacctccatccgcagatggcagtgtaccctcttcactgccaacacctaagatccctccataggcttcagacacatttgtaagtgatgctgagaacaaacctatattttcaagttcccacatgctgaacaaacactttcccttcctgtccacatcccagctatggctttcaggtgtggaatgaccttctccatctcaccccactcagaaagtgcgctcctgcctcagatggttttgacctccttagacttgaagttcacatccatgccaagcccatagttttttgattgtccaagttctctgcagaactccaactaacaagaagtggaggagataaatgaggcttcattggcgtggatcccacaaccagaaacactgggatagaaatctaaaatctagagaaagcgaaggttcccagattccaaggaatatgaaaaaaatgtatgcattggatagagcctgagaggcatttctggaaatccgccttagacaacagaccctaaatattaatacttctcagctacagtgaccctgggtttaccatctacgtgttaaccatctaagaaggcactgacatgtattttctgttttctgcttaagctggattttctctctcttttctttctctctctttctctctctctttctttctttctttcctttcttctttttttgatggagtttcactcatgttgcccaggctggagtgcaatggcgccatctcagctcaccacgacctcaacctcccaggttcaagggattctcctgcctcagcctcccgagtagctgagattaaaggcatgcaccaccacttgcccagctaattttgtatttttagtaaagactgggtttctccatgttgatcaggctggtcttgaactcctgacctcaggtgatctgcccacctcggcctcccaaaatgctgggattacaggtgtgagccaccactcctggccctaagctggattttctttttagcatttccctatcagatgcgatttcaccaatgtcctgtagctttcacaactcactgtttaaaatgttttccttttctttttccagaaaggtaggtttgactttatccaaatgacagtgactgccttactaacagcagccctgtgacctgttgcccacggtcagtagtcagtagctgacccctctctgcatccacacagttccttccctatccctttcccaagggtcctctaggactgctggagtccactccccatgaggcctcccctagcgtcagtcctcacccttccctgcccttcctgtctacacctaagcctggaacactgtgagtcttcaaagctccatatgtaaagattggctgcagggatttgaaattgagcaggaggatttcattctgaggttttgagaaggaacgtcgttccaggataaacctcactgagcagcgagtgtccctggtgccgccccacagcatctgtctactctgcctgtttgctgtcacaccgcgagaacaaagagcagttcactgttccctgcaagtgtccccaatcagttgtcacagatggagttttgacatgacagtttcaggaggagctgcttaagaaacagaagccaggtggtagttccgcctcccttgtgcgtgttctgtgcatctagccagtatgggcactgtcctagcctgtgcaggctgccttcacagagccccacagactggctggctgaaacaatgggactcgagcttgcatacttctggaggttggaagtctaaaatcagacaccagcagggccagtctctggtgaggtctctgtccttgggttgcagatggcctggccaccttcttgctctgcccttacatggcagagagagagagagagagagagagagagagagagagagctcgagctctggtctctttcttttctaataagggcactaatcccatcgtgggactctaccctcatgacctcatcaaactgaaattacctcccaaaggctctctctcctaatatcatcacattgggagttagggcttcaaaatatgcatttcgggaggacagaaggcaaggcctgttttcggcatttcttttcttttcttttcttttttgttttgagatggaatcttactctgtcgccagtctggagtgcagtggcatgatctcagctcactgcaacctccacctcccggattcaagcaattttcctgcctcagcctcctgagtagctgggactacaggcatgcccagctaatttttgtatttttagtagagacggggtttcaccatgttggccaggatggtctggatctcttgacctcatgatccgcccacctcggcatcccaaagtgttgggactacaggcatgagccacggcaccccgcctgtatttggcttttcacacttgtcctttctcccccagtctcttccgccttgcccttctttggttctctctgtgtattgtgagaagtcgatggagacatgctctttgattgctgttataatggaagaatatttcttctcctccaggaactctcctgatgaatgcagtgtggccaaaggcgggaagatggtgggcagcccagacaccgttgggatgaactacggcagctacatggaggagaagcacatgccacccccaaacatgaccacgaacgagcgcagagttatcgtgccagcaggtcaggtgcccacagcttcactgccctcggcagatcgcaacttccccaaggctaggctgagcctcagggagctcttctcccccacctgtggcattgatcacatctcctttgtccagagcagggcttgtaaatgggagctggcagaggtctatgcatgaggacatgttcacggatcgacagcaaagcaagaaaaatacacctgtatttaaaaatacaaatatttaaaaaatatgtgagacagcagtatgtagccccagctctttattttgccacatagagaaaaatacacacacacacacacacacacacacacacacacacacactacgtatggagagagacagagagaaagaggatgtccaggcaaacatgcagccttgcttgtgtgcacacacatatgcacacgtgtgtatatgtctatgaaaggtgacctttctagggaggaattgccacttcttggagattattgttccaaatatcctgtccttcatgaggtactatttatgatagatgatagacttgtttgtttttaaaattctcttatctggaaaaataaacatgtgggagccatatattatatggctgtcttacgtgttcccttaagcatctaaaattccagctatcactggcctgtaatacagattctaataaccagagtaactctttaccacaaacataattcaaaaccaacccaaaggaatagctcttgaacttgaaagacgtgacaagaacttatttatttagccaaactaaaggtaatagaaaaaatgacttaaagctcctcagaggatacatgctacctaaagccagaaatataagaacaacagcaacagtcaccagtcagtgaacctttaccctacaggaggcatttggataaatgctttagaaacgtgatctcaagcaatctttgcaaatggacatctttctcatgatttccctgatgaggaagatgaagttcagagaggtccaccaacttttccaagggcattaggctaataagaggccaagttaggactcaggcaggtctgccttactcctttagtctctgcctgttggcattggattaaatctcagctgcttacagcaatttctgtgggttccctcctgttacttgtttcagccatctggtcaccctgcggtcctgcctcagggatttgaatttggcgtcagctcagcctgaaacccttaattccaggtagttccatatcattttccttcaccaagtatccgtgccaatgtcatggcctcagggaggccagtcctgagcacttccgtctggaattgctctcgtctccacctgtgactgccagtctcctgttggcctgatttttcttgatttcattcattcccttctgccattatattgcatgtttatgtaaaagttttcttactggccagccatggtggctcacacctgtaatcccagcactttgggaggctgaggcaggagaatcgcttgaaccagagaggcagaggttgcagtgagccaaaattgtgccattgcactccagcctgggcgacaagagcaagactccgtctcaaaataataaaaataaaaaaataaaaagttttcttattatcctcttccctgaatggaacataagccccacaaaggccctatctccagggccagttgcagtgcctggtaagtgggaggtgctcagtgaatattaagggaggtggagaatggatgaacggacacctcaccactgagctgcactgtacaagttactccttgttggcaaagtagccaagggcatgcatgggtgaaatctgcacaaactcaattctcccttgctcctggggtcacctaaattaatatctgcgaagtgtgatggcaaacaggttagattccctccatggtgtgactttccctttacctgagttggatcatgcccagtgggcttctgtcaccttctagacagaagagttcaggagtgcagggtactttgcaaaacatctggcctggatttgaatcccaggtttcagcttagatctgtcaccatgtgactttcagcaaacacgtaaagctggttcgatgcagtggggtgtgaaagggaccatcctttggggttgtgcctgatttcaaagcattttttaagacttacaggagacactgatggtagattacgaaagggagaaaaccgtccttagtatttactgaaaggcagttgacaggtacagaggccatgcatttggtttgatcttgacaatgcacctgaatgcctgagactgcctcacttgctgctgtgcctcagaacagggggctgttcctgttggatgggaaaaatagaaacacaaatgtcccaggtgcccactccagatgtgtggcacataagaaaaactcgaaggctaggatgtgcctggaggagaggcaggagggcagtggtgtgttgcccagacactctctgggcatgaacaaagtgaagtagacacccaaaggaagccccctaacccatctcaccctttgccctcctccttaagaatgtaatttcttcaaaggagacaaaacaaagtgtttagatctcaaagatgagagaatccatctgagggggcctgcactgaagattccttgcttggttcctcattgaatcacagatgtaagaggtaatgcctggtaccatcttctaactggtgaggctgtatttccatgaggccatcaatatgctttgatgtcataaatatccttttcagtagggccagacttgagtctttctacactaaggaaagtatttagaaaataagagagatatttgtgtggggaagagaacagagaatcaactgaagtcagagcacccaggattttttatacatagtagctgctcatcaaatattagctggatggatgcaaggatagctctgcaaattggcttatagtaagctttgatgtgaaggctgtttcctttctttggagcaaagtactcttctcttcagctcttccctccttcagttgcttcacgccagtgtaggcagttattcagttaatagtgtttgtaagagagctagttgtggctgattttgcaagttgtgagtctttcagttattggtcaagcttcatgtatgtgtgctcatacacacacagagatgaacacacacacacacacacgcacacacacacacagcttcattgcacaatctggacaattttccaatgtggccatgaggttgcaggacctcaggcagctgtaccagctgctgtatccatccccatggtatccaggcacctcactaaggcagatttggggcacggagtaccccatgtgtgcaaaaagaattctccagacctggtcctgagtggttcacatagaccttactacttagagacattgcttggcactaatgcaaatcacacggatagctgagtgaaaaaaaaaaaaaccatcagttattcctaaacatttgtaccatcatcaatacatgccgatgtttacacactagagatagcagtggccctaataaacactgatgaggaaatttgtactgtacggagactgagagataaaaccacagaggagctggggggctttgtccgtgttcagattgggttctggtacctggaacccacttttgagaagcgattccctcaaccctggttttgatactcatgatcttgagttaataaagaagcccataaaaaaagtgtcaaaaaaaagcccataagaaagtgtcaactagaaaatgtccctgaaggataaatgtagactgtcacttgatatatttacactgcctcctatttcagaacagatttaagaaagctcacatagatacatatgaaagagcacggtagaatccactttttaaaaataaaggaatgtggagaatggactaaagtaaaaattgaacagagagagtaaaaccaggagtgaggtttacacgcacgtgtgtgtgtgtgtatgtgtatttttaattgcaacatttaaatattgcagaattgcaaaaggtaggtgttatttggcttcgaggtatcatcaggcagtatgaaagggataattcagtgcctacaggataaaaagaaagcaaatgtgaaaagatggtccagctattaattctgagtctggaggaagatgtgttcctctgtttgtcctaaggaagataaggggagtcatgagcaaagcattcaaccagtagcgccaccaggcattctgggcagccctggtttgtgcctgttgttctggcaagactgttgattgtgccttcccaaagggtactggttaggccataattcccatctctggtttttatctatgtatttggtgcgagtatctgtaaatctaggaggatctctcatagggcagggcagtctcttacactgtcgtaaacccaagtgtcattcagtgaaaccagttgtaataagaggggcctgacaagtgtgacatcccccatgctggttacatggctcttttttggccgagcttaatttggaggttgactagaaagtgtttttctttttctttctttctttttttttttttttttttttttgagacaaagtctcgctcttgttccccagactgaattgcaatggcaggatctcagctcactgcaacctctgcctcccaggttcaagtgattctcctgcctcagcctcctgagtagctgggattacaggcgcccgccaccacgccaggctaatttttgtatttttagtagagatggggtttcgccatgtttgccaggctggtctcaaactcctgacctcaggtgatccgcccacctcggcctcccaaagtgctgggattacaggcatgaaccaccacgcctggcctagaaagtgtttttcaaagtatggtcagaaccacttgtatcaagattacctggaaaatttatgattaaaaatacacatttcctgccagtcacagtggcttacacctgtaatcccagcactttgggaggccaaggagttcaagaccagcctggacaacatagtgggaccccatttctacaaaaaattttaacattagccaggtgtagtggtggttcctgtagtcccagctacttgggagactgaggcgggaggattctttgagcccagaagtttgaggctgcagtgaaccatgattgcaccacttcactcccaccaggaagccagagtgagaccctttcccagacacacacacacacacacacacacacacacacttccaaatgttccaaacctgggtgtggggttggaaattttacattattaacatgcttattgtgtatgtaattttcatgtacaataaggttgaaaagttctaatctagatagaagatataaattttactttaatagacttgaattatttttaataaagatatggtttatcacttttagaaaaggcaagtagacaaaaaggaaagatagaaatgattaacagtatcacattaacattccaaaaaaaaatgaagaatcactcattgcagtagttactgttactctttaggtgttggctgtgaacatggagatgtgctaaccaagtggctaacaaagaggaaggcacaggctccattcacttcttaaaagttgcaaaatgctgaccaaaatgcaataggacctctcgctttagcagcttatagcattttgaaagatttctctttttctgtttttttattattattttttatttatttatttattttgagatggagcctcgctctgttgcccaggctggagtgcaatggcgcggtcacggcttactgcaacctctgtctcctgggttcaagcaattctcctgcctcagcctcctgagtagctgggatctcaggcgcctgccaccacagccagctaatttttgtatttgtagtagagacggggtttcaccatgttggcaaggctggtctcaaactcctgacctcagatgatccacccacctcggtcacccaaagtgctgggattacaggcgtgagccaccgggcctggcctctttttctgttttaattccttaaaataggtgctaaagtgttgagtttttcaaatgcctctgcttctatttttaaaataattcactttcagcatagacccttgcaataatcagtaatctcagagataagagtagccacattcttctcttcactgtatctcttcactttcttcattattaattcattcattaaactcttactgtgttccattcaccgtgaataaaagctctaatgagatttaaaatcaccttttcttgcccaccaaacatgtgtggctgaagctacatgacttgtgtcttactcagacccctgtgctaggacctttctattccgttagaaagtgttcatggagttcccattactcttaatcactgaggagatgaccgaaggctgtcagaagtagctaagacccacccatgtggggtaagtagtttttgacagacaggagaaggtgtgattgagagctcaaatgaatgactcagaccagtatttcagagcatgtgaggaatggagattgctatgacaggacgaatcaagaacagcttcatttatacccacgatgatgtgatttcgaaagccctttgcagcctctgccgttttcctctgccacatccccaactcacgcgctgcattttcaccacccggtgtccttgtccctgcggttccctctctggaatgctcttgctcattcttccagacatcttcaaaatctgccctgtcaagggagccatgcttgatcctctggcaaattaatcactcctcttatgacatcttaccaattattttgttatcatactttattttgtttcatattgtattctcaaatgcatgtatatacttacttaaatgtggatattctgcaaaggatttgaggtgccgtgtgaactaaactactgatgggcttatacccaattgacttatcaaatggaaattaggaatcagtgctaaggcagttaaaaatacaaatgagaagccaagagcatgtgagggaagaatgcagccattttgaccacaagcttgcccaagatgctgtacttaagtttctagtatggctttgagcttcctggcagccaaaatgaaaagagttatttggggaaataatttttcctttcaaaaaagaagtttcacagggaaggcaatgtttatcatagtgtagaatcctaaaagaaggatcccttttggggccactggggccatagacctgaccatcgaccgtcttcctgccacagttgcagcactgcatttcaacagcttatttcttgtgacatcttctgtgagcgctgagttacattagagaatagctcagcacaggtagaggacagacacccagcatgagtctttggcagtctgatttcatgtaaagaagggatcttgagttctcagagtgttagaggactgcatagtttccacatgatcctccctaaatattgacattcccccactgggctttgaaagccagtgaataacaagtaatagaacataccctccgaccaagccctgatggctgatatattatgtttccaatcctcttagcgtgagttatttataagcctgtctgttctattagattgtaagtttagtgaggtgatgatcatgtcttttgtgttctcaatcgccagacaacacagccagcacttggattctgtgtggaggagagtaaatgtgatttatcaagttaacagtaatctagatctaactagcaggaatcgcagactcgcaggggttgcaggattcttggtggtctaagttcagtcttcctttaaacatgagaaaaccaagactgagagaggtgaaatgactttcccgggaacacttgcacaactgggtgagaccagagcctattctcaggcccagaacctgctggtgaaatgacttgtgtcttcatctttctttgttacgtccctgaacacacccgaggatctcttccactctgtcgatatgatgggacatgcttctttaatcttctgtttaaattcctgctatgctcaaacaactaaataacaaaacccactaaaatagaaatgctaacatcaaagtttattatgtgtattttaaagttatcagctgaatagcggttgaggaaaccaccattgggttaaatgtgaggctaaaatcaagtcatttttctaaaaagcaacgacagctactatctattgatatgcactgttgtcaggcacttggacatgcactttgtagaaaaggcattatctcatttaaatcatgcgaccaccctatgatgtaggtactcattatcattctcactcgacagtaaagaaactaaaactaggaacgctaagagagttgccaaatatgtcacagccaatcatttgaagagccaggattcgaacccagttctttctgactccacagtctgggttcttcttcctaagctgtgctgacaaaaatacccaggggagaacacaggaatgggatgagagaatgtgtttgttaaattgttgtagacattctgcaacagccttttcaaataagacttaagtaaacaaaggaggtggagagggaattttgtaaaataatctactgtgttgcccagggctaatttttacatttctacagtgctaatgatgttatctgtttttcttgaaagtcaaagagaagaatggaattgaagacagcttagatttagcatgagcagctgggtaggtgttaatgaatatacaaaaaaaaaatgtttaaaataggtgatttcagtttggttcatcctgtgtttaagatgcttctgggacacctgtcaggcagtgtggtgggcctagagctcaggatggaaagtccttgatcgggagtcacagcacttgagttctaaactctgccatgtactaactgtgggatctgggaagctacttaatcttgctgtttctcaggtttttcatcaccaaaatatggatgataataattcctacttcatgtggtgctatatggattaaatatagcaatatgtgtgacatgcttaaacagtacctgggataaaaagtgcagttcttctgtttatatttgggtctggcatctgtgagagtgccctggggactcaagatatagactggcagaaacagctgcctgttacaggttaaaaaattgtgcctccctcacaagatatgctgaagtcctaacccccagttccttagaatgtgaccttatgtggaaatagaggttttgcagatttaatcaagttaagatgaggtcattagggtgagcctaataaaatgactggtgtccttacacaaaggagaaatttggacatagacacacacagagggaagatgatatggaaacacagagggagaactccatgtgaagacaggcagaggttggactgatgcaactgcaagcaatggaacattcaattgctggacagcaccagaagctagaagagccaaggacagattttatccacagtctcggatggagcaaggccttgctgataccttgatttcagactttgatcctccagaactatgagacgatgaatttctgttgtttctaagccacacattttgtggtacttggttacggcagccctaggaaaataatacagcatgcatgttatagttcaaacatgagagcaaataagaatgcccaaagatacatatggagagaggagaggggtagaccaaggatgaaactctggggatagcaacatttaaagagaagacaaagaaagaaaacccaggcagggagaaacctttatgtggaacaagccattgcatttctaaaacatgatgagcacacacaatgttgtcatggaataacaggaggcaacaacaacaaaagaaaacaaagaacaataacgatcattatccaaaaacaagatgattacttgagaatggtttcatccagagaaataaatcagtgtgtcagaatgacaaagctatgtttagagcctaacaaaaataatttagtcatgtatttttaaataaaatacacagaattgtagattctcaaacaagtagaggacaggcactctttcttgccatttttgaatctttcatagaggattatacaattcatataagtaatttttgacaattgattaattaataaatgaatgaagtaaagcataacatgagttaggatgatggctgcattaaaaatgaaaactattcaaagtaaataggtaaaaagtatgcagagagggctcttggttctagtaaaatagagaggttactataaaaggacctgagaaacattccttttgcaaaacacctggaattgctgcatggagtttaacatccttttaaatgcacagctgaactgggaagaaaggcaatgaactccttagggactaaaataaggaaaaaagtgagaatagagcagagcagcacattcttatgttgacacctggttgtcctaggttgctataatgcagagatttgggttttaaaggtcaactaggggcaaggaatgaaatcttgagcttccacaaagcagagaattggaactgagcctgtcattacccgagtccccaccccatacacacaacagtgtgtgccaggaactctaaggctgagaaattaatacagaaaaatggtcatgggctagtgataatctgggaaacctggcagaagtaaatacgaaatcttcatggagagacatgtcttcaacctacgctgtacagaattcctgcagatagagacccgctaaagatgactctgccacccgcaaattacaaaaaaatagctgaagagagatctcccccaaccaagatttaacagaaacaatgaacatgattaagcagaaggttaaataattaaagtattggataaagagtataaaataaataaactttttaaatattaaggaagaacataaaagaaggagttaaaaagagagtttgttgctaattgaacctcacttcagataataacaaaagatttaatttaaaaaatggatcctagaagaagggagtgagatacaggaaggaaatgggagcaatgaaattgattaaggtgagggtagatctagaaagaaatggctgtaaaatgacaaccacagcctccctaagtagggagtagaaaattcagtggagtaaaaatatgagggaacattgtcatgtaaaatcagagatggatgattcaagtataagctttctaaattactggtaattaaacttagattttgtttaaagattaacaggaaagagaactagaatgtcaaagagcaaaaccaatacagaaacaaagaaaaaaaagtgaatgaagaaaagtagatcaatctgattagacacttggcaaggagaaatagagaatggactaagaaagtttaacataaagcacaaaataagatggtaaaaatcagatagatcagtgataataagtgtagatagaccaaatttgccattaaagacagagagtgatagactagactaaaaaatactccacaatcagttatgggttgtttacaaaaaaatcttgcacaaacaaagattgagagttgacagaataagatacgctagtgaaaattgaatttttaaaaagctgacaaaaatagaaatagaaagcagactaaatatactttcaggcagaaagcataactggagataattgagggtcattacatagtgaaaaaaggctaaattcatgacaaatatataataatgataaacttacatgtacctaataacatagccttgaaatatgtaatgaactgcaaaaagaaatagtcaagtccaatttagtgagatattttaatttgcatttctcagtaattgataggtcagtgacattaaaattaaatacaccttaccaagagttttttttctagaactctgtactcccaaattagagaatatgcatttcttaagcaatcaaggaacatttataaaaactgaccatgcactaggccgccaaaagagtaacaaaccggaactttttaaaaagctaatttcagctgggcatggtggctcacgcctgcaatcccagcactttgggaggccgaggtgggtggatcacctaaggtcaggagttccagatcagcctggacaacatggtgaaaccccatctctattaaaaatacaaaaattagccacgatggtggtgggtgcctgtaatcccacctattcgggaggctgaggcagttgaacctgggaggcagaggttgcagtgagcccagatcatgccactgctctccagcctaggtgacagagcgagacactatctcaaaaaaataaaataaaataaaatgttaatttcatacagactctattcactggccaacgtgcaataaaattagaaatcaataccaaaacaataaatgaactctacatataagttagaaatttaaaaggctcagaaacagtcttgaggtaggctctttatttgagatcaaatttccatttgtgatggagtgaatcattgctcaaatttaagccagttctctctattgggcctgctttataaatgtaacttctgtcctcctgaggatgcaagatgttaaatcttatttttgcaggcttatgagtgtcttggacagcagattggctgacttgcccagggcctggatttataaacaaacacctcactaggcttgtgatatggcttagaggtacattttagtttttattttttgatgtttttttcataaccaagagtaatttttttcttttgggaagccaatattttacgttgatattatttaagaaaaataacattcaggactttcattatcaccagtttggcttttatttaatcttactttattcatttctctagaggggcctctgaaagaagatgtttgcctgtgtgaggcattttgtttcacaaaggcacagtttgtctttggcgatgcagtgcccctttgcctgatttaaatatctactcaatattttcctggcaacaggggaactctactaggtcagaatcctgtttcatggaaatattttttttaaatgtcagccttcctccctccctcccactgcttatacccccactcccactccacatacagagtacattaacagtacaactccagaactctgtgtgtaatggtttacttttatttgttttttaaattccaatttaccaaagtagatttcataataaccatgtaacttaagatacaaataagaggcttcagagagtgatggcttctgtttagcctgtgccatgacagtttaccattttggtgtccatgacatgtagaatgatgacacagatgttttcaaaacaattggaatggaaggctgaaaatgaacaacttatcttcaatggcttatgattcatctgacagaagcatctccaaaagtttcttaaaataaaattataaattggacttttgtgtcttaaggaggaggctgcccctgtgataacagattttgttcttattccattttagcagagtttgcaatgcaaaatcgagtgtgtggatgcattctttttttgcagtatgttattgttggcaaagtgctttcacatccattatctcatttacttttctattcccctaacatttcatttaattacccacagaaaaatataaaacaaattccagagaggttgacgtttacgtccagtaaatggttgaataagaatcccaatgtgggtatttggattcccaataaagccttttattttcatcaccaagttttctgtgattggtgttatttaagatttttaaaaatttcttagaaattttcaattactctgaaatctctaaaaatgaaaatccaaccttgttagcaagactcaaggaccttgttgatctgagcccagctttcatccccatcctcgtatgttgctgtgctctctctgaaatcctccactgcagccacaccaaatttctccctttttcttaaacatgtcagatatttcatgcccatgtcggatgaggctgggctaagtggttcccctaaaccaaagagcttctctctacttctgtcaaaatcctcgctgttaatccaagttcactctcctggtaagcctttcccatttttcctggttggtgctacctctctgcacttccacttcctccttggatcacggagtctttttttttttttttttttttttatgagacggagtttcgctcttgttgcccaggcttctggagtgcaatggcgcaatctcggcttatcgcaacctctgcctcctggattcaagcaattctcctgcctcagcctcctgagtagctggcattacaggcatgcgccaccacacccggctaattttgtatttttagtagagatgaggtttctccatgttggtcaggctggtctcaaacccttcacctcaggtgatccacccgccttggcctcccaaagtgctgggattacaggtatgagccaccacgcccagcctgatcacagagacttagttctgctttgtggttgtggtcataagctgcctctctcagtgggtccttagtgtttctcttggtcttggacactttggaatctccatagtactggtgcatatagccatatgcataatgcttaatgacttttacttgaattaaatctatcttagttcttatcctattcgagtcatttctcaggtcctgaaattctccacattgttttacagaagagaaaaatgaggtccagttataaaattaaatgacaggttccaaacacactgctacctggagacaagaggtgttcctacctagggcagaaggtcgcacctaaacataggcaaaggtgatgcctcggctggggcttatgctgtagtcccctccccttcctcctacacatgtgtggttggggtcaagaaaggaggaagacaggcctgctgaatctcataggaactcatgagcccctttctttgattcctggtgtgacagaagccataaagctttgctgagataccatggagtgtggaggagactagagagactactggggctcttcatggagttaaaaggttaggaccaaaacctgacagcctggacccagtgcactgacctgaactctaaaaaccatcatctacagctgcagcatcattgcctggccaaagtagtggaggtggagttcagtgtgagcagagactaggtcttcagtcttgttatcacttcactgcccagagatttgttaagtgtttcctctgtgagaacatctaggacagatgcccaaaggaggtcgtgagtgtaggtgagggcacaagaaggtgctagtccttcacgctgtgggtggcatgtggcacaggcatggaggcattggctcaggaaatgtagggtggagggggaatggttgggaatgacacccatggaacaaaggactgtgtgcttcatgctggggaatctgggtttttcccctgcaaactgtcctctattgcaacacctccggagtgggtctgggagagtggtgcgagtgctcaggagaaaaggaatgccctcatttcttctaccgagtggccatgttttgttttcaccattgtttgcttagaaatttatagggcagaggtgtggagatcaaatgctaaaaggatgtgggagtgttctgacttcatgtaattttactcttttcagatgaagcagtctatattaacaaaatataaaagaaactgaaacttaactttttatactcttgacagcaattttataaaaatactttcacatatatactatatataggtagtatatatagcatatatgtaagtatatattctatatatattatatattttattattttataaaaatatttttataaagtattttagtagttttattttttatactttttataaaatgctttgcatagtttcatttttttaacttttctttttgtttttttacttttattttttatacttttaaaaaatactttttataaagtatttaaagtattttataaaaatactttcacatatattatatataggtgatatatagtatacatataatatacattaaatatatatataccttttgtaagaccatgttttggctttgaaaaatagagaatacattttgtataaataatttgtaacccaagtattccatatttattatagaaaaatgagaaaatatagtttagtgaaaatgacaaatctaaaattccccatctcctttccctcagtgacaacagttcacgttttgctgtatctccctctgaatttctttctgtgcagatatttatatatctttgcaaaatacaatgatatcataataatattttgaaactttaaaatgcaatctactttgaacattttatcatatcaataaatatatttcaacagtgtaatttttagtctctaaatatcacaggaacattcctaaatgcattacaaaactgcttctcttttgctggacatttagggtgtttccaatgttttgctattataaacaacactacaaagaacatccttgacaataaatcattgcgcacatcctctattatttccttaggataaatttctagaaatggaatttttaagccagggaatctgcacatatttaaagacgtttgattgtattgttgtgttgtattgttgtattattgtgttgttcatcagaaaggctgtagtaatttatactcatattggcagaactccggaactccagaacagccttttaccaactcaaagtgagacttgtagagataagtacaatacaggttgaggactttgtctctggggtcttgcacctgattcccttaaaggaaaactgaatgggccaggataacccttgtcttgatgagcgaaaccaattaaggggcacaccaagggataatagagagattaaacttctcctttcaccattttaacacgaacctagtggctttcagacaatatgtttatgtgtcattttgagaatatccggttccaccatttagagaagaaagtctgttcccagaatgaacttatttctaggaagtacagttgttacattaaaaaaaaaatagtcctcccattttgttaaaagcaaagcaaaacaaaacaaaaaggtgggtttcgctaacatcaaaggatggaacttacagggaatgacttgggtaggatggggggtcttctctctgtgagggctgaacaaactatcctctgcacagaaccaaaggtaaagagaacttgccctaagacctcagtatgatccatttttgtagaaagaggaattctgacatgtcatgaaaaaagaaacattttatctctgaaagccaaattctcagccaatgacgaagagtcatctgaacttcagtgaactggataacattaaccttccatatctacattcagttttcacagactaacaacatgtttccaagtgtttggatgacaaataaatatgtacacttttctgtcatcactgccgttggagtttttgttgatattctctctgtagcaaaaccagagttccctttagttttcaggttctgcgcactgatgatttttttttttttttttttttgagatggagtctcgctctgtcgctcaggctggagtgcagtggcctgatcttggctcactgcaagctccacctcccgggttcatgccattttcctgcctcagcctcccaagtagctgagactacaggcacccgccaccatgcccgactaatttttttttgtatttttagtagagacaaggtttcactgtgttagccaggatggtctcgatctcctgacctcgtgatccacccgcctcggcctcccaaagtgctgggattacaggcgtgagccaccgcgcctggcctgtgcactgatttttaagtgagaatgtgggtgtttaaatattggtagacatccaatgctagctggtcaagttgaagatggatgtgccctgtaactcagaaatcccgtatctaggtactcagccaaggccagcgtgtccccaggtttcatgtgaaaatgtagattctggttcagcaggtctgggtggggcctgagactcagcatttctaattagctcccaggtgatgctgatgcttccgcggttggaggaccacgcttggaatagtgaggcccagggaagatgatctgaaccttggctgctcattagagtcacctgggggagctgttatcaactgtgatgcccaactgccctccagcctaattgaagcagactctcccaggggagaccaggcatcactagtttttcagtctccccagatgattccagaaaggaccccaggccctggaccaatgcggactcattcacgcgtatgcatggagatggacaggggacattcactaaataaattgagattattcacatgggggaggcctaagagctgcttaatgattgagtatatctttgtgaattcatttggctacatcttgaaattataacattgagtgccaatagcaaatcatatatcgtttatgttaactttaaaaacacaaaacaatatatgtagtttaaatggtaaaaatattaaaatatgtataggagtgatacacgtactaacttcaggatagtggttacttctaaccactagctactaacttcaggataggtgtttgcagtaggagaatggaatgggaaaggtagattctactggacctgcaataatttctttcttctatgtagctgaagggaagaaagggagggagaagcgaaggaaggaagagggaaggagggagaggaagagaactctgggtgtatgactggctggctgtttctcactattattacggtttacctctgcaaacctaaaaatgtattgcagcagcatactacatgctccattcttgagtagcctaaaatattagtgggaccaaacaaacaaggatctgaaagtattagctaaaatgtgactcccacacctgactttcattcaagaggactggaacatcctggcatgcctgacccctaagggcttgtcccgggaactgagatcagtgctcttagtttacaggtgggacagacacagaaaggagaaatagctgcccacagcaaggtccagaaagtggagaaatggtgagattagaactcagggctccaactccctgcccatgtgtctctcagggctcggggcccaagggagcagccgccccatttaccacactctgaagaccctaccactgagggtgtttaccacaggacatcccggctggcgtttctgttggagatcacctgctccttctcccccgggccctgctctccctgtcccataggtagcactggagtgtgacgacgtggcctgcatcctgtggggtgtttgtgctcgccatggccagctgtggaatgcaaaaaccactcaccaaccccactcctgcaggtgctggttaattgcaaaaccaaacaccctgcaggaaaagtctggaactgacagctctctatgaggaacgctggctcataggaggggctagagtcttggtgtatctatatttcatttccgattctgtggtcagtatttttcagtattttgcataaatactgttattattatttttgttgttgttgtgatctgtaattagcaccttcctgatatgtgtggcttactcttatttccatataaatatatataaatataccagtagttttctaaggaaaagaagtttcctcttattcttactcattttaaaataaataaataaaattgaacataaatgagaaaaaagaatttttaaaatcttatgcctacaggaaactttagattgagcaaaaacaagggcatgtgatgtgaataatcccaagattccagaactattcactttaaagacaatgatctatggatgtgaggcagcttttgtctttcccccaaaatgttctcctgggtagccagggaggctggctggaggctgtgcttgtggaaggcagctggtcagaaatcccacgtggatggggatctaccccaagatgaagatccctggcttcaggaattgactgaatgtgttcccacccctttcagatcctacgctatggagtacagaccatgtgcggcagtggctggagtgggcggtgaaagaatatggccttccagacgtcaacatcttgttattccagaacatcgatgggaaggaactgtgcaagatgaccaaggacgacttccagaggctcacccccagctacaacgccgacatccttctctcacatctccactacctcagagagagtaagctcccccttcctccaaggatagatggctgtggctatggttcttatgacctgagcttcagagggttcaaccaggtgtgtcgacagcatcctcctgccctcgcccagttcccactggggatccgagggagccacatgcttggtatgtgatgacttaggggagcaacaccctggccacatcacctgatgagaagtagtcagcgctctcaggagaagccaaaattcacttcaacactcagctgcctcctccagggtcctgcgaccaagaagatggaatgtcaaaggggaaaggaagcgttaactggtcacacattagttaagtctccatgataccccgaatcgaaatagaatcattaaggcttctctttcgtaggaattagggggattattctccctaaagctacatgaagccccactttatattctaacctgagcacagaacaagggaagttttcactttgtatcatgtgattcggcttaacctgacagaaagggatggcatgttggcatgaatccagaatgtttgctgcatgctttaatttctacaacgtccagcatggtgagaaggaagtagtgtgacagacagtgaggtggataaattctcctccattgctttgcctggcatcccaaccacttcttccctgaattaaagacgggcccccatgtaggttttaacatgctaacaagtagcaggttgctggaaatagttataagcttcccatgatgttagtgtgggagtgggggaacggttttctttctttctttttctttctttttttttttttttttttgtaagaaaggtaattctctttctctctctctcttttttttttcattttgatgtcgctttttgttttgttttgtagctcctcttccacatttgacttcagatgatgttgataaagccttacaaaactctccacggttaatgcatgctagaaacacaggtaatgctggccccgcccctgcctcccagcaagagcgtagggtcttacgtacaggttgcatgctttcatgggaaaccagtcagcgcgtgccaggaagacagaacgcaggtagatgattcagaatactttcggatacttaggaatgtaccacagcctaaaggaaggtgaagccctttggttttctgagcgcttcccaagcaccccactttgattatcaaagggttcctttttaaccaggagacgtgcagaatttgcctttagccataacttagctcacatttgccggattacagtcttcttctgttggtcccaatatattcgctgtgctgactctgtagacactaaaagcatgttcgatataaaagggcccttagcaacctcctttaattttttccatttttattcttaaagaaatatttgctaggataagttggaattttctttttcctttccaataaacttttaggctatttgatttgttttcctacagactttgtatgtttgcaaaaggcaggagggaatttctgtaacattttgagagcttttgttcagagggaacctctgctataattttggagaatatgaaattagtcactaaccaaatgcctgttttctatctctaaccgttgcctctacatttgacttagttatgtatttattttgcctgagcctaagtagggtttaacaccgtgcctcatcctggctaaccttcctccctcgccccccgctcacagcagaggctgggttttctgtggatgaatgtgttcctggttcacatccatctgctccttcctgatggagagagttccggaagcatggccaccggctgctcaccccactctgttagctgcagggaccctccacaatcactcgggctagggagggagacgggaagtgccagaaagccttgcaagtcagccagttaactcacgatcagccctcacatagaaatacgcaattttcccaatatttaccattttattttaaaatataaaatgtgagtgagtcccggtttgagtattacaatgaaattgctcatttatcatggtcttctatattcaacacattgtctttttaatctgaagttttaaaaaacctgcttcgagttggtagtacactttttcaataattttggttgcacacatcagcctattagtgaccttgtggccagaaataacagataacttagaggaagttacttccccttcttaggaaacacctttgagctatgcacattttctgataatttcacatttatttatgagttctttaaccattgagtgaaagtttcaaaaaagctccaaatatattaaattttgctattgttaaacacggaagaaaccaatgaacaagacaacaaattccaaatggactgaactatgaaaagggaattttctcagctaacagcatgagttttggtcaaaagagagagagggaaaatgcatttgaatagagatgtggattaattattaataaaatccatatactcttaggctaaatacttataattgcttgatactactttccaaaagctctgtaaaatatattatgggtttttatacaagttgaaaaataaaacatgtaccatataattttttaataaaacgagattgcccagtgggaagtgggattgagggggacacagatagggcttcatcaagaagttataaaatcaaaacacaaaacgctttatagcaaacggggcacaggagtacaccaaggctccaagtttcacttccatcttgagaatctgacaggtgcacctgtctgtttctccggagctctgttaaggcaggtttgaggaggtctcttccctttgttgtcatagggaaaagtagatttggcgctgatgttgagatcgacaaccacaacaaaagaccttcacatgtttgtctttccttttgtctgcagggggtgcagcttttattttcccaaatacttcagtatatcctgaagctacgcaaagaattacaactaggccaggtacgaaaacacccctgtgtgatctcttcattgagagacatcccagatgtcctgctgagatccgtgccctaagtcacgtgatacaaagagagctgatcccggagctgaagccagtcccagacagtcttattctgcctctgttgatttggagactaaatccactcaaaccatttcattcaaagaccacactaaaggaattaagagcagattagccctttaactagcttttcagaaagacagatgggcaaagaaggcatcctggatgcctggcagttaggaataggccgacttttgaactaacagaaggatctgtccctcctcgggggaagagcacaaaacaaggacactccccagattcacagtgaccgattatcagtatgtcacaagaagccagtcttgcagagcagaagcatgcaaccagtagtatttacatctgaatcttactgcctgtcctccaaatgatttaattaggtaataaatttacatgccattcatgcaaaaataaacatctatcaagtgcccattagtgccaagcgtggtgttagactctgggaatatatagatgaaccaggcttcagtaagcttcctgtcttcagaaagtttacttcttcattcagcttggtttgttcatttgctgagtgcctcctctgtgccagccacggatggtatgatggtgaacaaaccgaaatgttttgcctccagttctagatgtttcagtagagtgacctagagccagagagacacatatgtacacataaatgttttccctaatgtgatagattttatggtagaggaaccacttctagcaatacagggcgtaggagcaggggtggggaggaactcaatcccccatgaaaggcataaagatgctttccagaggaatggccacatggcaaaggggaattagatgtttgccagacgaataatgagcagggagagagggcatttcccagaagggtatagcttgcctttagcatttgtcctctccctgggacttacatcagcccgataagctaggtatcattgtaccagcctcacagctgatgacattgtgttcagggtggtgggatggtttctccatattcatacatgcttccagaattcatgttaaactctatcacatatccggaatacacaagtctcagttcgaactggttcaagatctaggcttggcaactactctttctttctaatgagaaagactgggggcccagggagctaaagagaatgaatgaggaagcttctcaggctgttcaaatactgacactgccctggttactgcctagtgacttcaggctggcaattttctcttctctaacgtcagagaaaaagtttactgtcttgctcctgggaagcatgatggaaaggcttagcagctaaggggtactaagaggtagtaagtcatctctgtcatgtaaaagatttcacaggccattgaaacatgggcaagacccagtgcctagagtctgcaagattggtcctaaagacatccaccacgtgtattgcgagtggaaaatagaaattcatgtttgactcaagctttagagattttgtaattctgtgagcatttaaaaaatatttccatataaactaaaaaaataaaaactatttccaaaacatttggctagggttttaaaaatttttttactttttaattttgtatttgtttgtttatgttaagacatctcataggtgcctctgactgagttgcaaagccaggggttgtgagctagtattataaactgtgttaaaagatcacaacactggccaaattcattggcacaatctctctgtcagacaagccagctgactgatgctacctggttaagacagtgggtcctggagctgctttgttttcacattttaggatatggtggatttggaaggtatggcccatccaggtggatggagaagagggtgactgtgaggatgttggttgggactccctctctgcccaacccagggaaggcaagggtggcaaactcagacacctcccatgccgctctgatggtggtcttccatgggcccataatttgagcgtgacctgggagagagcacacttccacagctccactactagtcaagtatgttttcgcgactcagtttgtacctgaaataacctgttttgaccactgctactgtgattatgagaaccaatacaaatattggtatctgacctgtaaagaatttaaagcagactgaacaagccagaggactatttactgtaggccctattcagggacttgaacttggagataagaactagttatacacctcgggtcatccattgctaagcgatcaaccttaaaggactgctcctgtggagataaaagctgtgaacctgcaactggagaatgaacgtcgtgatggctgagggggaagagcttttgcatcactaactttcagagctgaacgagctccagagggaggtcactgggaatctgacgatatccctgtggtcagtgggtacctgactactttcagaaaggtgattgttgactgtttctttgaaggtccttggggatacagacccaaatccctgtctcctccactcttggtttgctgtgccatgatcttcatttccataccctttgtctaatcccacatccgagggaaccgaactctggtcagcgttattgtgctgaccatgaagcaagccaggctcctaggtaacaactctacttagaccagaatctgtctcttctctgcatggtggccgtttcattatagagtccctgatagaggagacagtggtgttcagggtttactggttaaattagacagcattccgcaccctttctgcagagactcctacacatgtgtgttgtcctgctgcatccaccttcccagcacttcctcaccacccttccctccttcccttcccactgtgagtcacccatccctgggttactgccccaacctaccttttcttttcttttatcttcttttctcttcttttttttttttttttttttttgagatggagtctcactctgttgccaggctgaagtgcagtggtgcaatctcggctcaccacaacctctgcctcccgagttcaagtgattcttctgcctcagcctcccgagtagctggggctacaggcgcatgccatcatgcccagctaatttttgtatttttagtagagatagggtttcaccatattggtcaggatggtcttgatctcttgacctcgtgatccgcccacctctgcctcccaaagtgctgggattacaggcgtgaaccaccatgcccagcccccaatctaccttttcttctgttcatggcccaccttcccaagtggatcatttattccagagccccctgactgcttccctgtcaggtcagtctcgctgctgctgtgtcagttcagtctccctgcacaattggccgaggccgttcactgacctcacaggggaccacatgtgaacatgccctgccaccaccactacctgccatttgtccaaacctcatcccttttccttgcatgcccgtacctagtattttcccacgttttcctgattcaagatttaccttctttcacaacccctttgttgaattagcattgagacagtcttctctactctcataaagtatcaacccataggcatatcattttacattctgtggttttatgattttttaaatatatatatattttattatactttattttatgatgtttcacgtgtttctcacgttgttgcagttactacgaccagaatccctttctgtacctcctctacaaacacccttcttttttgctgaatccacttcttttggagccatagccctttgaggtctcaggggaaaaagtggcaaaaacagatccacagaatcttgcaagcccctattaactacacagtgcaccaccctgcctgtcctcttaggagcaggtcatgcaaaagctcagttctatcccaaggatgatgttctgcaaccccatcctttcctcttccatccccatgacaacccatatattatgatatgcctctggggtgttatcaaaagagattagagagttaagcctgcaaatgcagcctttgcttctactttgaagctgctgctcttcaggggtttcttggaatcttaaattattcctccattggagctcacagcctagtgcttttcagcacagctaggcatagtgagacaatacaactactgcatagcatctctcagttaggtgttatgtaaagcctgtatcttagcaaatggctaaaattgcattctttgcttccgcttagttcttatataaccacagggatatgcaaacctaggcaagaagggaatgcaaaatgtttccaaaactccatgctcaaactttgatgtagaattttaagaagatctggaggaaaatagagagcaacttaattatgttaaggttgactcaaactttttttttcatttcacagacacttctagattggttcttagcagcagctcttgctcttcctaatttgtgttccccattagcatctaatttcaagagcaggcaaatctcatctgttcccatccagcccagccagggaacctccagagttgctttgcagatatggtgtggatcctgcagaatgaggatgagctcttccacgatccacattcttgccctttaaaaaataaagcgggtaggcagcggggtggcggtgtggggtgtgtggggcaagagctagagcgttcctcctcagtgagtttgatgaagggagaatgtaaaacttggctgaacttagccctccaggaaagggtagccagaatgttgtattaatttagtgatgtcttcaaaagggtgtggtggaggaggagtctcattcagaatgagaagctgatcccagctcccaggaaatcgacacagttgctggtgtgtagtggtcagcactagccgagtccctatttgtagcttcatgctgttttttatactgttgtgatgtaatgtacatctgtgttcacccaagctgcctatgcaatgacttctataaagctcagtttttaaacacagtctcttacagataaaacaacagaaccagtgccagaaagcagccttcccttacatgggcacttctgccaagcatatgagttcattgccttgaagatcaaagtcaaagagaaatggagagggtgttgaaatgatcagcgaaaattaaatgtaaaatatattcttattggaagtctgatgctctattatcaataaaggacacatagcaaagatacatagaggagtgatttttcaagcagtcaagagcagaactacgaaggttttgagatggtgtagctgccaaagaagtcacccctggctgtcccccatctcagtgagcctgagttgaatgtttcccaatgtcatatcccacagggggatacttagtgcccacagcatgtgatcggtagccgataaggaagcattggaccagaatgtcatggaagaaaacaaaagcccacttatcttccgcggcaatatgtttatgaacatgtgaatcattgttcatataactgtctcaaatacttggctgaaaagtagactgtttggtgttaagtttcgacttattttcgagggaggatgggatatggttatacaccatatgaaggattttgtgaataaagagtttcaaaatattttgggaatagtagttcggcatttattttttttcccagtcacatttcatgagcaacaattttatgtttaaggtagtatctgactaacctactgatgctgtctattcattccattagcatacttatgccatgggtaaaagcaatccatctagaactctttcaaccattttttagtttgtctttgcacactctagatagcatttctgaaatcatctgcaggaacagagttcctgaaaagagcaatggtctagagcaggctttctcagacttcagtgtgcaccagagtcacccaggatcttgttaaaatgctgattctgaggccaggcgcggtggctcacgcctgtaatcccagcactttaggaggctgaggcgggcggatcacggggtcaggagagcgagaccatcctggctaacagcatgagaccctgtctctactaaaaatacgaaaaattagccaggcatggtggcaggcacctgtagtcccagctactcaggaggctgaggcaggagaatggtgtgaacctgggaggtggagcttgcagtgagccgagatcgcgccactgcactccagcctgggggacagagcgagactccacctccaaaaaaaaaaaaagataataaacaaaatgctgattttgatgcagtaggtctggggtaagattctgcatttctagcaagctaccaggtattgttgatgttgctggtccacagaccaccctttgagaaacagagatctagaacatatttctgtatttctgtattatcttgctttttttcatttggtaaatagaaggccttagttaatgtgcttttctgctcctaaattaggttagatgtggctaggattgccttgtgagtaggtttttctttctgagacaatttgcaaattgaaactctggctgtccagtttattttagacaaaatgcaactgactgagaacccatgtgcagagtgttcccagagacttaagttgaagttcagttgtaaattgttaggggctgcagatataattcctatgtgtaaccccaacacaagagatgtgaaaatctgaggatctgggtgggaaaagatttacgtccaaaaatgcaaaaatgccagctgagagagaggagtaacatcagtttaaaaagaaaaattatctaattctccaaagctctgaagggtaggatttcatagaccacactagtagcaaagatgcttgcagccaaacagaccaaatacattaaggagattctgtgttgactttcacgttgcgcatcatttctattctctttgggatatgaaaataggaagagacacatcttctgcaacacagtcaagctctttgaagattgacccatcaaattgctggttttaaacaaaattaaaatatttgtttaaagagaagcttaaaaacaattgcattgtcctaccctccaagtgaaattttgtacacatctcctggtgtctggcagcaaagtacctgctgagatatttggccatggccttcacttggcccagaatgacacatgacattgaactgagaccaagcaatccaagaagacataattttgaaacagttatgtaataagattgcatgtagaaatagccttagctatgcactcttagcaagagtattataataaggtttctgtaatatatttttgaaacaaacttgaaatgacatagagctttgataatcattaatagaactcacactgaggatgcagaagtatagttattaaatttgcatatgaaaagtaaatgaaggtttataggacaagtgatacgactttataaatacaaagaaatgtttggcatatgcttaagctcagaaggtcatcattaatgggctgtgggagcaatactatttcagtcctgtaattcatttcatgcaggtcattttagagaaattctaaatttatttagaacattagaaatgggagacatttgcctatgaaaatcactagatcagataagactgatttaatataaattgatgagattataaagggaaaatgggagttggctaagagaggcagctggcaaataaaaagataaggcagcgatcacttcccaggagatgcaagaagaaaaagaagctgaatgtcatttgattgatttaggaacagacctcaaacaaaaatgggctggttcatccaagttgtagactctgctttggatgagtcatgaagataataaagagacagatgtagatcagtcccagtggaagcaggatgaactagattgtaagaaacttttattggggtcttgacttatggttgtaggaaattagaagagttggaaagctctgggagaatctgccaatggaagttttcagacaaacgggtgagaattttagaccactataatatatgaaattttaatttgtaaataaaactcaaatctagtgggatatttctttggattaccagatttttttgcacaaagtttattctaataaatacaaaatcaaataaaaaaccaaagcatctcttataaaaattacatgattgatcttttagtcaatttatttgtctttacagatttaccatatgagccccccaggagatcagcctggaccggtcacggccaccccacgccccagtcgaaaggtacagtgttggctcccatgaccctgagtttcatgtcacaggcagtggatgactgttgatggagtatataataatttctgtggttaatctgtgattttgcaacatgtgatgggtttgttccattgacgacaagagtacaattgatctttcactgcagtgattctttctccatttgggtcatcaggactttcataacaaaaataaaggaatgatgtagtgtatgtcaaccttcacaaatgcatgtttcatgggatgtttgagtacacattaaataatcggtgttttcctgaatcttggccatgcttaaaagtatccctggctttactttatttgactggtggtttccctttatgtgtttatcttagactatgatttattgtaatctgtttggtaagccattccaaattcttttttttttttacttttggaaaaagtgggaggtatccattttttaaataattggaaatgtcctctttttttgttacagtgtttacatttgatttcatcagaaaggaaaatttttccttaccgtgagatgcttctgagttagactattatgttaataactaaattaactgatagaatgattatgcaacaacatcaaagactagtgaccaaatctgttatagctaattgccttttgtatttctggattttcagctgctcaaccatctccttccacagtgcccaaaactgaagaccagcgtcctcagttaggtatgtttcaggggccgtctggataaccataagagaagattcaggctcagcagcacatttctaaaatgcttcactttttaatggaaattaacatgattgtttgcctcttttcgacagctccatacataagatagggcccaagtcatcagcctactcatgcgaggtgacttgagatggtgctaaaacacgtccccaactatgcaataaatagggaaaaaaattctacgtgcacacaggctgcttctttgtgatccattaattttttagattttactttccatgcctaaacaacacagcctgcacggccctggattgatggggcttggcacatgtttgccctctttatatcattggttggtgtgagccttgagctatatgtcaggatcctggggttgaatccaagccctgccaccaattaggagtcccctagcaagacatctgagatgccgtgtgacatcttctctcatagaggaggtggaggcagttgatttggagttggaggacattttcggctctgaaatctgaaaaaacaattaagtcaggcattatgtctgaagtcacatcatactatgttacaactatgtctaggatttgactttgtttctttttgctgtagatccttatcagattcttggaccaacaagtagccgccttgcaaatccaggtgagaaactgctgatgattttcttcttacaaaattactttttggcagtggttattttgaaaagtaaattggtattggtgagaaattccttcaactgaacagattttagttttaggtctcactgaattatttgccttaatggaaagatgggttgggttataaattaagatttcagcttcagcaaagaacattataacctaatccaagctgtaatagttttctagggctgctgtaacaaagtaccacggattaggtggcttaaacaacaacagtttattgtctcgcagttctggaggctggaagtctgaaatcagagtgtcatggtggcaggtttcgttccttctcagggctgtgagggagggatctgtcctgggggctctccctggcttacagatagccatcatctcctcgtgtctcttctcatcatcatctctctgtgtgtgtcagtctctgtgtccaaatgcctcttttgcataaggacattggtcaggttggaatacctaccccataaccttactataacttgattacctcatttaggatcttatctccaaaaaaggtcacattcttagatactgcgggttaagatttcaacatagggaattgagggaacacaattcaacccattatacaagcagataaaataactagtattttttaaaagagagccttgatacaaccacaagacttcaaattcaggctcatcttcgatggtctgtttctgaacttcgatgctagaagaaagtgcagattcttaattagcccatttgtaaccagtgcattgccaaggtttgtcacctgtcctagtgtttcagtgccaaccacatagttttatttgtttgtattcagatcagaaccagctgtgctggcaccagcttcagaaattcatagcctatgctgcatattcccaactgcaaattcaaatgccaagatgttacaggcatattgcaagcacaagatggaatgtgtatttcctaaacgttgaggccaaaataaggttcgaaatggaataattaagatttaatcagtgtacatccctgcaagagaatctacacattgaaaacacgaaatgttatcattattgaacatctgtatttttgaagttaaattttggttaatgttaatgaattcaatgaattttttttacacagctgaaaatctaaagaaaactagttagcctggggcctagactaggtgctcaataattatttgttgcatacatgaatgccaaggataatgagatatagtcctttagctcagggtgcttttggtccgtggagagatggacacaggtagttacaacattgtcccaaacacagagccacaggccctttttgctcatgctggctttcatctagtagcccaggctcctgaggctgtggtctcttctcagccttctgctcagcttttcatttgcaactctgccatataaccattcaaataaaaataatgactatgttttgagatgattattatcagtcatgcttcaggaagactgatctggcagcaatgttcaggatagattagaaaaaagaaaatgacggaagctgaaacactctgggaatgttaatacaatcatgtgaaataacaatcaaacagctcccatcccgcagaatgccccccatagaatgtctgtggtcccttctgtgtctcataacagccctgggaggttactatctccatcctacagaaaaggaattagaagtccagagaagttaagtaacttttcctgtgtcacacagccaatgataagggaggtcaggttagaaacctgactctgtctgcaaagtctacttttgttttcttgccctactctgccactgactaagtatgaagggaagaggaggtcttacaaaatgcggactgtgagaatagaaagcaaggatttcctttcagggtcataactgcttaggtgcaggcgatgaatctgaggtcaggaaggaagaggaggaaagagtcaagctgcaccaaagaagaccaaactggcctttgcactcacacattggccaaatgaaacatatatgtccatgaccacgttgtcacagcccaaaggtactgcttggcttgtttgtagaatagggcctgagtcacttgctcctaagcaaagtgccagctttcacaagggaacactgcatatgccctgggcccagcagcccggggatgccctttgtagatagagggacctgagctcagagcaaggagaccggaaactcatcacaggcctggggaaggaggactgtgcttcataccattaagactgttcttaatgggcctggagaaaatggcaacatcccatctttgatttgcaggcaagtgactttaagataaagatttatttcatttagtttctgatgaatttgactttctctccatctatctttaggtttgtgtctgttgtgctcatgtgaacttttcccctgaaaccagaatgtcttttatctttgtattaatgacaatgcttcttcctgtttgattctatttttctattctctgataaataaatctttcatcacttaaaaattgctgtctttgctcttcatacaatacaaattccttttcatcattttaagtggaaagattgcatcatatagtatgaatgcacaggatgatgtcagcatcccaacatctctatcccaaatattcacttgatgtgtactttggacatcacttttcctgctgagaacagtgtgtccctgcattctgatatcatggatcggttataagcaacacagctcctttacatcccatcagagcagctgagaatctatctaacatggttcctctaatgaaagagctttggtgggttatgttcagaggcttccttgatgctaactggatactcttcaatggtgcacatgaaaatacatcctgcctcttgcagaacgacagaccaggctagggatgttttcccatttgttaggaggtggcagtgtgcagtcttccagtgggagtcccccagggaggggacaacatggaaaggacctgaggaggctacagaggtgtgcataaaccaggcctgaaagcaagtttgcgcagtgattaagcatggcagcctagagtctggatttcaacccttgccaacgctaagcaaaataagtcagtctacctctctaagctccaatttcgtcacttctccaatggactaatcacatgattcctgtggggattaaataaaccaatacatgtaaagcgtttagaatggtgcatggcacacagtaagctttcagaggatatcagtcagcccaagaatagcaccgtttcaagcttcttcatggttcaataggccaattgaacagtatttctctttctttaggcatttcctggctataggagaggagtgttatctttccttaaactctgattttcagcccaaagaaattctgacaagaccattcaagtactgagttcatccttaccatgatcttgcaagatagtactattaccatcacccccactttacagatgacgatactgaggcagagagagctgcgagagttgccaaacgtcccacaaagggcagaggcaggattcagctgaagcagtggcaactccaaagttggtgctccctaccaccatgctttcctgcccctccagtaagtggtgcctgagcctcactgagcctcggggcagagacttccattcaggacacacctgctggacacacctgctgccttgcagagggtccaggccatgcacacgggatcttctgcaccacccctggcttctagagaaagtggccccaaaccactgccacatggtactggtggggcccctcacggctgtatttactgcccttgttcatcagctgacggctgcagggctttgcaccaggatgctgtttccaccagacacagctgctgactcactctgcagctctctgctttgctctgtggtttgtaaaccgtttagtttttttttcccccttttttgctcagtctgtacccctttgctaccctgtttctctccctttcttttaacaatattaggagattactttcctctgtaaaattaaaggagtgcctctgtcttcttaaaagccacagccgctccctttcacccacagggttctctgtaggtggacaatgctgcttgccactgttttttacctccaaatatgttttattttggtaattaccctaagaaaaaattagttcctccttactgacatcgcaaggatgttattaagagagagtaaaaaaaaaaaatagatctgaagggtttacccaagaaaggtgagtcctaaggtagaggtggtgatgctactcaatgaaagctcttgtctttcaagaacttctctttgtaaatcctggtttggcccatgagtgacccaagccacttttaggctttcctaaaccctaagcattcttgtttggaaatctctattctatattctaaaatgcacctcgtcacacattaaatgttattgttttggaagtaaaataagaatttaaaaattgctcttaaaattttatgactgagaataattcctttaccactgacaattttttaacaaccattgttcatttttgagaattcttgcagtgagaaattttgttctacacactgcaaaatgcagcgaattttgttacaaatattaaatttaacaattaatgagtttgacatgatgttactctttctaccatttacttaaacattcattgattttgcatttccaggtttctttcaaggtttgaaagctgatgaattttgcttacagttctcttatttctatagaccctcccttgaaattctcacagtcctgagccctatgtctttatggctactgggtaaaatagtcaagtgagaaattagctcatccatcctttgggcatagagtttgctgccacaaatttaggtcccctgctttctaactcttcagaaataggagagacatgagatcacttttgtccactgattctgtcctacacacgtttataagagaaatgggtgagggacaaattgctaagaggcaatgccaaggtttgagtagattccaagtgtgatttcggcaggtctgtggagttgctttctctatgggagaaagttgacgctgaatatttattttcaaacaaccgtatgtgtttatattgaagcatctgttagactgttaaatcaaaaatccatgccttttcctattcccaggtcatatacggaattttttcaagttgtaattttttggttacaatatatatactaagaccatatggttttctcataccattctttgtattttctaaatgcatattaataaaatgttggaggcaacaaaacttgattgggaacagtttgtatatgtggttctgaaaaagcaaaggcttccacttcaatgagctacaagctgttaatacatttcaaatgtgttgctagactgaaaatgagcactttccagcatagattcagaaaaagctgacctttctcacagtgctattgtatggataaattcacaaaaatatccatgtccatgtagccaacatgcaaagcagagtttataagttgggtgatatgtacaggaggctagcgaggatttagaagaaaatgaacgtaaaattgatttttacagtatattacttccctgagtagatgtcagttaaagttactttaatcattttatcacatcgattgatattacttacactataataaaaggtaatcttttggtaataagtctaaggcagtgctgtaactggaatttgggaggaaagacccacctcccatctgttcttaagcttctgaaatatgttcagcacagcttagcttctcttggtacggatactgctgtcaatatttacatgctgctgtcttctagggagccataaactatcttcaagtattgtaacatagcagctagaatgatgtgcctagatttttctttgaatttcataaaacaaagctgtatctgtatgatttcaatgaaatcaagaaaattctgactttgtccacccagctaaatgtgatctctttgacaaaggaagagtctcattcagcttcccaaggggacttgcaatcactcattgttggggtttttcttctggaaatgctgcttaacacaattggcgttgcagcacacaggcaaggcactggtttccgttacgatgcgcttgcccaaatactggaactgggtgatctggtttgaaaaagagccagctttttttttttttttcctaaacttcctcattttgagtgggttaattctgttctaggaaaagttttcacagaattgctttctgagcgccagcaaaatgttatgttagaaataatggtgtttacttccattctcgatttttttccataaacttttagaagttcatttcctaaatctaacttttattatcttacttgacctagccaatataaatggcattaagtcattattgccatccacataacagtactttgtgcttcacaaaataggaaaaaaaaatatatagctctttcatcccctaaacaccaggttgatctggctgttcttttaaggacgtcagaaatggatggaagcagcctgaactttgccccatatgaattcgctgcattccatctaggtcttgaatctgttagatcatcgtcctaggtcgggttcccttgatgcagagcttggggtaagcctgcttgtgcaggtgactgattaacggcatgttctcaggagagagagaatgggaagtgctgcaggggcagcgctaaggaagtttctggcctcctccaagcctccttgcagctggacgctgtttcagcccaatcccacgggagccctgaagcctgaatagcgtcatggagttggtctttccttgaggcaagggggccggcccgtggtaccccgttcagtccacccagctgtgggatacctgggggtgggcgaggcggcggctctgttcaggcaagggcagttctctggagaagtgggtggccatggaacgagagcagtccgcacccctgcagctgagggatggacggacaggcctggtgaagggaatgtgggcggcacaccaatagcacctccttccgtcatcacagagagcctctttcccctggaacctgtgctcactggagttttccttcctctcctgacctcattaggcagtggccagatccagctttggcagttcctcctggagctcctgtcggacagctccaactccagctgcatcacctgggaaggcaccaacggggagttcaagatgacggatcccgacgaggtggcccggcgctggggagagcggaagagcaaacccaacatgaactacgataagctcagccgcgccctccgttactactatgacaagaacatcatgaccaaggtccatgggaagcgctacgcctacaagttcgacttccacgggatcgcccaggccctccagccccaccccccggagtcatctctgtacaagtacccctcagacctcccgtacatgggctcctatcacgcccacccacagaagatgaactttgtggcgccccaccctccagccctccccgtgacatcttccagtttttttgctgccccaaacccatactggaattcaccaactgggggtatataccccaacactaggctccccaccagccatatgccttctcatctgggcacttactactaaagacctggcggaggcttttcccatcagcgtgcattcaccagcccatcgccacaaactctatcggagaacatgaatcaaaagtgcctcaagaggaatgaaaaaagctttactggggctggggaaggaagccggggaagagatccaaagactcttgggagggagttactgaagtcttactacagaaatgaggaggatgctaaaaatgtcacgaatatggacatatcatctgtggactgaccttgtaaaagacagtgtatgtagaagcatgaagtcttaaggacaaagtgccaaagaaagtggtcttaagaaatgtataaactttagagtagagtttggaatcccactaatgcaaactgggatgaaactaaagcaatagaaacaacacagttttgacctaacataccgtttataatgccattttaaggaaaactacctgtatttaaaaatagaaacatatcaaaaacaagagaaaagacacgagagagactgtggcccatcaacagacgttgatatgcaactgcatggcatgtgctgttttggttgaaatcaaatacattccgtttgatggacagctgtcagctttctcaaactgtgaagatgacccaaagtttccaactcctttacagtattaccgggactatgaactaaaaggtgggactgaggatgtgtatagagtgagcgtgtgattgtagacagaggggtgaagaaggaggaggaagaggcagagaaggaggagaccagggctgggaaagaaacttctcaagcaatgaagactggactcaggacatttggggactgtgtacaatgagttatggagactcgagggttcatgcagtcagtgttataccaaacccagtgttaggagaaaggacacagcgtaatggagaaaggggaagtagtagaattcagaaacaaaaatgcgcatctctttctttgtttgtcaaatgaaaattttaactggaattgtctgatatttaagagaaacattcaggacctcatcattatgtgggggctttgttctccacagggtcaggtaagagatggccttcttggctgccacaatcagaaatcacgcaggcattttgggtaggcggcctccagttttcctttgagtcgcgaacgctgtgcgtttgtcagaatgaagtatacaagtcaatgtttttccccctttttatataataattatataacttatgcatttatacactacgagttgatctcggccagccaaagacacacgacaaaagagacaatcgatataatgtggccttgaattttaactctgtatgcttaatgtttacaatatgaagttattagttcttagaatgcagaatgtatgtaataaaataagcttggcctagcatggcaaatcagatttatacaggagtctgcatttgcactttttttagtgactaaagttgcttaatgaaaacatgtgctgaatgttgtggattttgtgttataatttactttgtccaggaacttgtgcaagggagagccaaggaaataggatgtttggcaccc

SEQ ID NO: 2 - DNA, 3055 bp, homo sapiens
  misc_feature (0)...(0): cDNA of ERG1 isoform
gctctaaacaacctcatcaaaactactttctggtcagagagaagcaataattattattaacatttattaacgatcaataaacttgatcgcattatggccagcactattaaggaagccttatcagttgtgagtgaggaccagtcgttgtttgagtgtgcctacggaacgccacacctggctaagacagagatgaccgcgtcctcctccagcgactatggacagacttccaagatgagcccacgcgtccctcagcaggattggctgtctcaacccccagccagggtcaccatcaaaatggaatgtaaccctagccaggtgaatggctcaaggaactctcctgatgaatgcagtgtggccaaaggcgggaagatggtgggcagcccagacaccgttgggatgaactacggcagctacatggaggagaagcacatgccacccccaaacatgaccacgaacgagcgcagagttatcgtgccagcagatcctacgctatggagtacagaccatgtgcggcagtggctggagtgggcggtgaaagaatatggccttccagacgtcaacatcttgttattccagaacatcgatgggaaggaactgtgcaagatgaccaaggacgacttccagaggctcacccccagctacaacgccgacatccttctctcacatctccactacctcagagagactcctcttccacatttgacttcagatgatgttgataaagccttacaaaactctccacggttaatgcatgctagaaacacagggggtgcagcttttattttcccaaatacttcagtatatcctgaagctacgcaaagaattacaactaggccagatttaccatatgagccccccaggagatcagcctggaccggtcacggccaccccacgccccagtcgaaagctgctcaaccatctccttccacagtgcccaaaactgaagaccagcgtcctcagttagatccttatcagattcttggaccaacaagtagccgccttgcaaatccaggcagtggccagatccagctttggcagttcctcctggagctcctgtcggacagctccaactccagctgcatcacctgggaaggcaccaacggggagttcaagatgacggatcccgacgaggtggcccggcgctggggagagcggaagagcaaacccaacatgaactacgataagctcagccgcgccctccgttactactatgacaagaacatcatgaccaaggtccatgggaagcgctacgcctacaagttcgacttccacgggatcgcccaggccctccagccccaccccccggagtcatctctgtacaagtacccctcagacctcccgtacatgggctcctatcacgcccacccacagaagatgaactttgtggcgccccaccctccagccctccccgtgacatcttccagtttttttgctgccccaaacccatactggaattcaccaactgggggtatataccccaacactaggctccccaccagccatatgccttctcatctgggcacttactactaaagacctggcggaggcttttcccatcagcgtgcattcaccagcccatcgccacaaactctatcggagaacatgaatcaaaagtgcctcaagaggaatgaaaaaagctttactggggctggggaaggaagccggggaagagatccaaagactcttgggagggagttactgaagtcttactacagaaatgaggaggatgctaaaaatgtcacgaatatggacatatcatctgtggactgaccttgtaaaagacagtgtatgtagaagcatgaagtcttaaggacaaagtgccaaagaaagtggtcttaagaaatgtataaactttagagtagagtttggaatcccactaatgcaaactgggatgaaactaaagcaatagaaacaacacagttttgacctaacataccgtttataatgccattttaaggaaaactacctgtatttaaaaatagaaacatatcaaaaacaagagaaaagacacgagagagactgtggcccatcaacagacgttgatatgcaactgcatggcatgtgctgttttggttgaaatcaaatacattccgtttgatggacagctgtcagctttctcaaactgtgaagatgacccaaagtttccaactcctttacagtattaccgggactatgaactaaaaggtgggactgaggatgtgtatagagtgagcgtgtgattgtagacagaggggtgaagaaggaggaggaagaggcagagaaggaggagaccaggctgggaaagaaacttctcaagcaatgaagactggactcaggacatttggggactgtgtacaatgagttatggagactcgagggttcatgcagtcagtgttataccaaacccagtgttaggagaaaggacacagcgtaatggagaaagggaagtagtagaattcagaaacaaaaatgcgcatctctttctttgtttgtcaaatgaaaattttaactggaattgtctgatatttaagagaaacattcaggacctcatcattatgtgggggctttgttctccacagggtcaggtaagagatggccttcttggctgccacaatcagaaatcacgcaggcattttgggtaggcggcctccagttttcctttgagtcgcgaacgctgtgcgtttgtcagaatgaagtatacaagtcaatgtttttccccctttttatataataattatataacttatgcatttatacactacgagttgatctcggccagccaaagacacacgacaaaagagacaatcgatataatgtggccttgaattttaactctgtatgcttaatgtttacaatatgaagttattagttcttagaatgcagaatgtatgtaataaaataagcttggcctagcatggcaaatcagatttatacaggagtctgcatttgcactttttttagtgactaaagttgcttaatgaaaacatgtgctgaatgttgtggattttgtgttataatttactttgtccaggaacttgtgcaagggagagccaaggaaataggatgtttggcaccc

SEQ ID NO: 3 - DNA, 3097 bp, Homo sapiens
  misc_feature (0)...(0): cDNA of ERG2 isoform
cccccgagggacatgagagaagaggagcggcgctcaggttattccaggatctttggagacccgaggaaagccgtgttgaccaaaagcaagacaaatgactcacagagaaaaaagatggcagaaccaagggcaactaaagccgtcaggttctgaacagctggtagatgggctggcttactgaaggacatgattcagactgtcccggacccagcagctcatatcaaggaagccttatcagttgtgagtgaggaccagtcgttgtttgagtgtgcctacggaacgccacacctggctaagacagagatgaccgcgtcctcctccagcgactatggacagacttccaagatgagcccacgcgtccctcagcaggattggctgtctcaacccccagccagggtcaccatcaaaatggaatgtaaccctagccaggtgaatggctcaaggaactctcctgatgaatgcagtgtggccaaaggcgggaagatggtgggcagcccagacaccgttgggatgaactacggcagctacatggaggagaagcacatgccacccccaaacatgaccacgaacgagcgcagagttatcgtgccagcagatcctacgctatggagtacagaccatgtgcggcagtggctggagtgggcggtgaaagaatatggccttccagacgtcaacatcttgttattccagaacatcgatgggaaggaactgtgcaagatgaccaaggacgacttccagaggctcacccccagctacaacgccgacatccttctctcacatctccactacctcagagagactcctcttccacatttgacttcagatgatgttgataaagccttacaaaactctccacggttaatgcatgctagaaacacagatttaccatatgagccccccaggagatcagcctggaccggtcacggccaccccacgccccagtcgaaagctgctcaaccatctccttccacagtgcccaaaactgaagaccagcgtcctcagttagatccttatcagattcttggaccaacaagtagccgccttgcaaatccaggcagtggccagatccagctttggcagttcctcctggagctcctgtcggacagctccaactccagctgcatcacctgggaaggcaccaacggggagttcaagatgacggatcccgacgaggtggcccggcgctggggagagcggaagagcaaacccaacatgaactacgataagctcagccgcgccctccgttactactatgacaagaacatcatgaccaaggtccatgggaagcgctacgcctacaagttcgacttccacgggatcgcccaggccctccagccccaccccccggagtcatctctgtacaagtacccctcagacctcccgtacatgggctcctatcacgcccacccacagaagatgaactttgtggcgccccaccctccagccctccccgtgacatcttccagtttttttgctgccccaaacccatactggaattcaccaactgggggtatataccccaacactaggctccccaccagccatatgccttctcatctgggcacttactactaaagacctggcggaggcttttcccatcagcgtgcattcaccagcccatcgccacaaactctatcggagaacatgaatcaaaagtgcctcaagaggaatgaaaaaagctttactggggctggggaaggaagccggggaagagatccaaagactcttgggagggagttactgaagtcttactacagaaatgaggaggatgctaaaaatgtcacgaatatggacatatcatctgtggactgaccttgtaaaagacagtgtatgtagaagcatgaagtcttaaggacaaagtgccaaagaaagtggtcttaagaaatgtataaactttagagtagagtttggaatcccactaatgcaaactgggatgaaactaaagcaatagaaacaacacagttttgacctaacataccgtttataatgccattttaaggaaaactacctgtatttaaaaatagaaacatatcaaaaacaagagaaaagacacgagagagactgtggcccatcaacagacgttgatatgcaactgcatggcatgtgctgttttggttgaaatcaaatacattccgtttgatggacagctgtcagctttctcaaactgtgaagatgacccaaagtttccaactcctttacagtattaccgggactatgaactaaaaggtgggactgaggatgtgtatagagtgagcgtgtgattgtagacagaggggtgaagaaggaggaggaagaggcagagaaggaggagaccaggctgggaaagaaacttctcaagcaatgaagactggactcaggacatttggggactgtgtacaatgagttatggagactcgagggttcatgcagtcagtgttataccaaacccagtgttaggagaaaggacacagcgtaatggagaaagggaagtagtagaattcagaaacaaaaatgcgcatctctttctttgtttgtcaaatgaaaattttaactggaattgtctgatatttaagagaaacattcaggacctcatcattatgtgggggctttgttctccacagggtcaggtaagagatggccttcttggctgccacaatcagaaatcacgcaggcattttgggtaggcggcctccagttttcctttgagtcgcgaacgctgtgcgtttgtcagaatgaagtatacaagtcaatgtttttccccctttttatataataattatataacttatgcatttatacactacgagttgatctcggccagccaaagacacacgacaaaagagacaatcgatataatgtggccttgaattttaactctgtatgcttaatgtttacaatatgaagttattagttcttagaatgcagaatgtatgtaataaaataagcttggcctagcatggcaaatcagatttatacaggagtctgcatttgcactttttttagtgactaaagttgcttaatgaaaacatgtgctgaatgttgtggattttgtgttataatttactttgtccaggaacttgtgcaagggagagccaaggaaataggatgtttggcaccc

SEQ ID NO: 4 - DNA, 3055 bp, Homo sapiens; identical to SEQ ID NO: 2
  misc_feature (0)...(0): cDNA of ERG_1_D6-10

SEQ ID NO: 5 - DNA, 2372 bp, Homo sapiens
  misc_feature (0)...(0): cDNA of ERG_1_D6-12
gctctaaacaacctcatcaaaactactttctggtcagagagaagcaataattattattaacatttattaacgatcaataaacttgatcgcattatggccagcactattaaggaagccttatcagttgtgagtgaggaccagtcgttgtttgagtgtgcctacggaacgccacacctggctaagacagagatgaccgcgtcctcctccagcgactatggacagacttccaagatgagcccacgcgtccctcagcaggattggctgtctcaacccccagccagggtcaccatcaaaatggaatgtaaccctagccaggtgaatggctcaaggcagtggccagatccagctttggcagttcctcctggagctcctgtcggacagctccaactccagctgcatcacctgggaaggcaccaacggggagttcaagatgacggatcccgacgaggtggcccggcgctggggagagcggaagagcaaacccaacatgaactacgataagctcagccgcgccctccgttactactatgacaagaacatcatgaccaaggtccatgggaagcgctacgcctacaagttcgacttccacgggatcgcccaggccctccagccccaccccccggagtcatctctgtacaagtacccctcagacctcccgtacatgggctcctatcacgcccacccacagaagatgaactttgtggcgccccaccctccagccctccccgtgacatcttccagtttttttgctgccccaaacccatactggaattcaccaactgggggtatataccccaacactaggctccccaccagccatatgccttctcatctgggcacttactactaaagacctggcggaggcttttcccatcagcgtgcattcaccagcccatcgccacaaactctatcggagaacatgaatcaaaagtgcctcaagaggaatgaaaaaagctttactggggctggggaaggaagccggggaagagatccaaagactcttgggagggagttactgaagtcttactacagaaatgaggaggatgctaaaaatgtcacgaatatggacatatcatctgtggactgaccttgtaaaagacagtgtatgtagaagcatgaagtcttaaggacaaagtgccaaagaaagtggtcttaagaaatgtataaactttagagtagagtttggaatcccactaatgcaaactgggatgaaactaaagcaatagaaacaacacagttttgacctaacataccgtttataatgccattttaaggaaaactacctgtatttaaaaatagaaacatatcaaaaacaagagaaaagacacgagagagactgtggcccatcaacagacgttgatatgcaactgcatggcatgtgctgttttggttgaaatcaaatacattccgtttgatggacagctgtcagctttctcaaactgtgaagatgacccaaagtttccaactcctttacagtattaccgggactatgaactaaaaggtgggactgaggatgtgtatagagtgagcgtgtgattgtagacagaggggtgaagaaggaggaggaagaggcagagaaggaggagaccaggctgggaaagaaacttctcaagcaatgaagactggactcaggacatttggggactgtgtacaatgagttatggagactcgagggttcatgcagtcagtgttataccaaacccagtgttaggagaaaggacacagcgtaatggagaaagggaagtagtagaattcagaaacaaaaatgcgcatctctttctttgtttgtcaaatgaaaattttaactggaattgtctgatatttaagagaaacattcaggacctcatcattatgtgggggctttgttctccacagggtcaggtaagagatggccttcttggctgccacaatcagaaatcacgcaggcattttgggtaggcggcctccagttttcctttgagtcgcgaacgctgtgcgtttgtcagaatgaagtatacaagtcaatgtttttccccctttttatataataattatataacttatgcatttatacactacgagttgatctcggccagccaaagacacacgacaaaagagacaatcgatataatgtggccttgaattttaactctgtatgcttaatgtttacaatatgaagttattagttcttagaatgcagaatgtatgtaataaaataagcttggcctagcatggcaaatcagatttatacaggagtctgcatttgcactttttttagtgactaaagttgcttaatgaaaacatgtgctgaatgttgtggattttgtgttataatttactttgtccaggaacttgtgcaagggagagccaaggaaataggatgtttggcaccc

SEQ ID NO: 6 - DNA, 329 bp, Homo sapiens
  misc_feature (0)...(0): cDNA of ERG_1_D6-13
gctctaaacaacctcatcaaaactactttctggtcagagagaagcaataattattattaacatttattaacgatcaataaacttgatcgcattatggccagcactattaaggaagccttatcagttgtgagtgaggaccagtcgttgtttgagtgtgcctacggaacgccacacctggctaagacagagatgaccgcgtcctcctccagcgactatggacagacttccaagatgagcccacgcgtccctcagcaggattggctgtctcaacccccagccagggtcaccatcaaaatggaatgtaaccctagccaggtgaatggctcaag

SEQ ID NO: 7 - DNA, 40 bp, Homo sapiens
  misc_feature (0)...(0): junction of the intragenic deletion of exons 6-10 of the ERG_1_D6-10 cDNA (20 nucleotides 5' and 20 nucleotides 3' of the junction.)
agccaggtgaatggctcaagctgctcaaccatctccttcc

SEQ ID NO: 8 - DNA, 100 bp, Homo sapiens
  misc_feature (0)...(0): junction of the intragenic deletion of exons 6-10 of the ERG_1_D6-10 cDNA (50 nucleotides 5' and 50 nucleotides 3' of the junction.)
agggtcaccatcaaaatggaatgtaaccctagccaggtgaatggctcaagctgctcaaccatctccttccacagtgcccaaaactgaagaccagcgtcct

SEQ ID NO: 9 - DNA, 200 bp, Homo sapiens
  misc_feature (0)...(0): junction of the intragenic deletion of exons 6-10 of ERG_1_D6-10 cDNA (100 nucleotides 5' and 100 nucleotides 3' of the junction.)
agatgagcccacgcgtccctcagcaggattggctgtctcaacccccagccagggtcaccatcaaaatggaatgtaaccctagccaggtgaatggctcaagctgctcaaccatctccttccacagtgcccaaaactgaagaccagcgtcctcagttagatccttatcagattcttggaccaacaagtagccgccttgcaaa

SEQ ID NO: 10 - DNA, 300 bp, Homo sapiens
  misc_feature (0)...(0): junction of the intragenic deletion of exons 6-10 of ERG_1_D6-10 cDNA (150 nucleotides 5' and 150 nucleotides 3' of the junction.)
taagacagagatgaccgcgtcctcctccagcgactatggacagacttccaagatgagcccacgcgtccctcagcaggattggctgtctcaacccccagccagggtcaccatcaaaatggaatgtaaccctagccaggtgaatggctcaagctgctcaaccatctccttccacagtgcccaaaactgaagaccagcgtcctcagttagatccttatcagattcttggaccaacaagtagccgccttgcaaatccaggcagtggccagatccagctttggcagttcctcctggagctcctgt

SEQ ID NO: 11 - DNA, 40 bp, Homo sapiens
  misc_feature (0)...(0): junction of the intragenic deletion of exons 6-12 of ERG_D6-12 cDNA (20 nucleotides 5' and 20 nucleotides 3' of the junction.)
agccaggtgaatggctcaaggcagtggccagatccagctt

SEQ ID NO: 12 - DNA, 100 bp, Homo sapiens
  misc_feature (0)...(0): junction of the intragenic deletion of exons 6-12 of ERG_D6-12 cDNA (50 nucleotides 5' and 50 nucleotides 3' of the junction.)
agggtcaccatcaaaatggaatgtaaccctagccaggtgaatggctcaaggcagtggccagatccagctttggcagttcctcctggagctcctgtcggac

SEQ ID NO: 13 - DNA, 200 bp, Homo sapiens
  misc_feature (0)...(0): junction of the intragenic deletion of exons 6-12 of ERG_D6-12 cDNA (100 nucleotides 5' and 100 nucleotides 3' of the junction.)
agatgagcccacgcgtccctcagcaggattggctgtctcaacccccagccagggtcaccatcaaaatggaatgtaaccctagccaggtgaatggctcaaggcagtggccagatccagctttggcagttcctcctggagctcctgtcggacagctccaactccagctgcatcacctgggaaggcaccaacggggagttcaa

SEQ ID NO: 14 - DNA, 300 bp, Homo sapiens
  misc_feature (0)...(0): junction of the intragenic deletion of exons 6-12 of ERG_D 6-12 cDNA (150 nucleotides 5' and 150 nucleotides 3' of the junction.)
taagacagagatgaccgcgtcctcctccagcgactatggacagacttccaagatgagcccacgcgtccctcagcaggattggctgtctcaacccccagccagggtcaccatcaaaatggaatgtaaccctagccaggtgaatggctcaaggcagtggccagatccagctttggcagttcctcctggagctcctgtcggacagctccaactccagctgcatcacctgggaaggcaccaacggggagttcaagatgacggatcccgacgaggtggcccggcgctggggagagcggaagagca

SEQ ID NO: 15 - protein, 479 aa, Homo sapiens
  VARIANT (0)...(0): native ERG protein encoded by ERG1 isoform 1
MASTIKEALSVVSEDQSLFECAYGTPHLAKTEMTASSSSDYGQTSKMSPRVPQQDWLSQPPARVTIKMECNPSQVNGSRNSPDECSVAKGGKMVGSPDTVGMNYGSYMEEKHMPPPNMTTNERRVIVPADPTLWSTDHVRQWLEWAVKEYGLPDVNILLFQNIDGKELCKMTKDDFQRLTPSYNADILLSHLHYLRETPLPHLTSDDVDKALQNSPRLMHARNTGGAAFIFPNTSVYPEATQRITTRPDLPYEPPRRSAWTGHGHPTPQSKAAQPSPSTVPKTEDQRPQLDPYQILGPTSSRLANPGSGQIQLWQFLLELLSDSSNSSCITWEGTNGEFKMTDPDEVARRWGERKSKPNMNYDKLSRALRYYYDKNIMTKVHGKRYAYKFDFHGIAQALQPHPPESSLYKYPSDLPYMGSYHAHPQKMNFVAPHPPALPVTSSSFFAAPNPYWNSPTGGIYPNTRLPTSHMPSHLGTYY

SEQ ID NO: 16 - protein, 211 aa, Homo sapiens
  VARIANT (0)...(0): ERG_isoform 1_D6-10_distal ORF
MAQAAQPSPSTVPKTEDQRPQLDPYQILGPTSSRLANPGSGQIQLWQFLLELLSDSSNSSCITWEGTNGEFKMTDPDEVARRWGERKSKPNMNYDKLSRALRYYYDKNIMTKVHGKRYAYKFDFHGIAQALQPHPPESSLYKYPSDLPYMGSYHAHPQKMNFVAPHPPALPVTSSSFFAAPNPYWNSPTGGIYPNTRLPTSHMPSHLGTYY

SEQ ID NO: 17 - protein, 176 aa, Homo sapiens
  VARIANT (0)...(0): ERG_isoform 1_D6-12_distal ORF
MAQGSGQIQLWQFLLELLSDSSNSSCITWEGTNGEFKMTDPDEVARRWGERKSKPNMNYDKLSRALRYYYDKNIMTKVHGKRYAYKFDFHGIAQALQPHPPESSLYKYPSDLPYMGSYHAHPQKMNFVAPHPPALPVTSSSFFAAPNPYWNSPTGGIYPNTRLPTSHMPSHLGTYY

SEQ ID NO: 18 - protein, 444 aa, Homo sapiens
  VARIANT (0)...(0): TMP_ERGa_ERG1_CDS
VSEDQSLFECAYGTPHLAKTEMTASSSSDYGQTSKMSPRVPQQDWLSQPPARVTIKMECNPSQVNGSRNSPDECSVAKGGKMVGSPDTVGMNYGSYMEEKHMPPPNMTTNERRVIVPADPTLWSTDHVRQWLEWAVKEYGLPDVNILLFQNIDGKELCKMTKDDFQRLTPSYNADILLSHLHYLRETPLPHLTSDDVDKALQNSPRLMHARNTDLPYEPPRRSAWTGHGHPTPQSKAAQPSPSTVPKTEDQRPQLDPYQILGPTSSRLANPGSGQIQLWQFLLELLSDSSNSSCITWEGTNGEFKMTDPDEVARRWGERKSKPNMNYDKLSRALRYYYDKNIMTKVHGKRYAYKFDFHGIAQALQPHPPESSLYKYPSDLPYMGSYHAHPQKMNFVAPHPPALPVTSSSFFAAPNPYWNSPTGGIYPNTRLPTSHMPSHLGTYY

SEQ ID NO: 19 - DNA, 232683 bp, Homo sapiens
  misc_feature (0)...(0): genomic DNA of a resprsenative intragenic deletion of ERGD6-10
  exon (1)...(37): Exon One.  Isoform 2, exon 1
  exon (76750)...(76851): Exon Two.  Isoform 2, exon 2
  exon (85948)...(86033): Exon Three.  Isoform 2, exon 3
  exon (163222)...(163332): Exon Four, ERG isoform 1 exon 1.
  exon (216075)...(216292): Exon Five.  Isoform 2 exon 4, isoform 1 exon 2
  misc_feature (222357)...(222546): other SNP #9 D6-10 proximal break point
  misc_feature (222547)...(222553): extra nucleotides between breakpoints of deletion in other SNP #9
  exon (222554)...(222808): Other SNP #9 distal match
  exon (222847)...(222903): Exon 11.  Isoform 2 exon 9; isoform 1, exon 8
  exon (223520)...(223567): Exon 12.  Isoform 2 exon 10; isoform 1 exon 9
  exon (230639)...(232683): Exon 13.  ERG isoform 2 exon 11; isoform 1, exon 10
cccccgagggacatgagagaagaggagcggcgctcaggtaagctggattttgcggtcggaattcgcgtagaaacgaaaacttctggaaggggcttagccccgagccccggaggcggacaagctgagcctcctggctgcaccctttggaggctgctggttgcagacgccgtcgtctcccaagggcggctgtcaccgcgtgcgtcggtcagaccaggccgcggtgccctcggcatccccgcgtcccggcggctgtatccggctcctccccacgaccgaggtcccgggcaccgcgcctctccctccggacgctctgcgcgacgtcgtcccagttctcatcagcatcgagggcagtccgcggtcattttataaacgtcttagtgtcgcaaccgttttcacttttactattttcaatgtttgcaacggttttcaatgaggctggaaaaatatcacttctcgctaaaagcgaccccgagttaggaggagcgcgcacccccgcggctccccctcccacactttccctcccctgaccccctctcctcccctctggtccttcccttgctcctcgcccctccagtagtcgcgtgctgggttcctttcctgctggggccggactctctcctccggccgtcccagcctctgctcctccgcctccctcctcctcttcctcctcctccgcctcctcctcttcctcctcctcttcctcccggagccgccagccgcgtcctaaacccgagcagggcgcgtagtgtccaaacctgcccgcgcggcccgcgctcttggccccgagggcgcgcgcacggacacgcgagcacacccacacccacgcgcacacggacacgcgcgcactcgaagactcccgcgcgctcgcacccacgcgcacctggccacgcgcgtgcattcccgcccacgcgtccctgccccgcccccggcgcgcactccgggttcgcaagtcgcgcgtcggggcggccgccctgctccgcgattggcgggagccggagcctccctgaacccggcgcccacaccatgggctgagcccgtcggcgccgagggagttagtgcgacccggctcggcgcgcacggccaaggcacgcgcgctggcacacgcgggcgcggacacgcgcggacacacacgtgcgggacacgccctcccccgacggcggcgctaacctctcggtaagtccagcgccccacgcgacctgcccggctcccacgctggctacagcggctgcggggacggggaggaaggcagcggggtggccctaggggctcactctgcagggctcttccgacggcgccgggacaggtggggcgtccagcgccgggagggacggctcgccagtgcggggtcccagggaggcgcgtgcagtcgggtgcggatggagaggagggggcaccccgaaattgacaagggccaggagagcacaccgcggggacttcatctggggccccgaccaagaggttatttgtccttgtctggagtggaaatcagggttgaactaaaaaagctgacgcttggcctaaagtagggaccaggtttgaggctgggttgtcactgtccgctgggtcctgatggtggaatgacccccgacggcgccttcccgcacaccccgcaacaccggctctgggaccagctctcagcgccaggagcggtccctttcctttcccactctcagtctcagtcttttcacctttccattcttcagcctgcagctgttaagtttatttgcctccagtttaccaccctaattgcaaaacttggcatgttaaaaaaaatatagtctgtattttatcagctagccttacctggtttctgtctgaaatacatcgtccgtttattgctatggtatgttgcatagatgcatagaggcattaattatcttttaagtacaggacaaattctgttattaatagcagactacactgcgcaataaaatggataaacaatttcaatgaggatgtggatttaatacaactcatcgttaatctaaagatagtttcctttatctttcaaaataacatattcgtatgtgctacaggtttcactctgtacatgtctctatagcttttgtagttcagaaaactttcaatgtgagtaaaaatacattttattcttccctgggtgacatacataggacacagagtttatttacctttgggactatttttgactgttttccattctctccaagtagtttagagcccctgaagggagaactgtcacagtcccaaagttaacccttgctccgctggcattggctggtgcccgctcccggggcaggccagagctcatagccttcatccacaggaggatcaggcaacagacgttgcgaagaacccaaccatgtaaattaattcaccatgtgtcaaattattaataagctaattacaccattgaaattataattctagcagaaacggtgagctatgtaaacttgtggctaatatatcaagttttacaattctcaagaaaggctttagaagagctacacacatcacaaatgctatttgccatttggtaatcctagcttcggtttgggtcaatggcttttggaaagtacactgaattagcaaatgggtaatccgtctcaagatatttgttaaggaatatataattccagtagcacttataattccagtttcttctcttttgtaacattttataattacttcattctatttaaaaaaatttagagtagaattgtagtacatgatttcacgtttatctgttatttcatgaggaattattggtgatttaatctttagctaaaatttagaaaattagcatttaccattgaagggattgtgtgaggggctgcattcacacctgtatataaacattcccccctccacgttccacgttttgcttttatattaaagaaaaaccttgttgagtttttaatcttataaaatcagatattttatttgtggtaagacctaagatcccaatggaataccagatacataagtaagaaggaaagcatctctgaaagacgtcagaaggaatgtgtaactcacatactattctacaatgttatacgttatgtatcttttaaatgcatctcacattgtaagtagggtaataggaaactttcaacactttttttttctaaaagtaatattagtttttatttttatcttgctatctttaaacaaaaaagaaataaaagggggaatttatttcttctcaaaacagaagagctaatgtttctggaatcgtttcctattcccaggcaaaaaccgatagcaagtcagtcccggtcataggatctggagtggtgggaagacattgtcatagtgaataaatgtctgatgcctgttatttcatagaactccattgagaaggtgtcgacacagagccacctacgtttctaatgagacttatggagcctgggaagcagtttggtcaaggtggcaaaatcccagctctgtgaggcatcaggtcacttctcagtttaagttgacagctgatctctctgaatgcaggtctctttttgtcacctctttgcttctttaccccttgcgtctgagcagttttccagagagcaggagtatggcaaaggagttcttttttccttccccagtgtgtaaggttacttgggctttcccagggagcatggtccttcacaatacagctattgtttaatgttctacaccttgaatttgaaccttagcagcaacatttgtaagaaaaataggctgatgtaacagggacgttcagatctttggggcacagtttccgatgattatggtacttagtggcagtggtgtgagtagggctttttgaaaactctgaaaatcactgcggtatttggggatgctcatgcttggcagtgaccagccacccctccatattgttgctgttccttgcatgatagcattctccctggtatttcccacactcttattaggggtcagttaattagttgtccattatgcattgtcagtgtacggacctctcacaatgattgattgaaagcagttattttgtaaataaacaacagcgggagttttccaatggcttttccaatggctgggctgtcacccaaaccagttcttcaacatagctaaaaaagttaaaagttaaagttaaaaggggcatctttcccttttaactttatcttttatttaaaacattttcatattagaaagaggcttgaatgcttcatgtttgtaacattgcaaagtctagtgaaggtagtgaaggagggtgagctaaaattactttgctaaatttaagtataagtaaaatgtagacaaaaccaagaaattaaagggtgcatctaaaaatggagcgctggatctaagttttagatttaaactaacttttaagttctcctatttttagggtcgcatgtcataatctgggagaccctgattgcgtatgagaaacagtaattttacaatgaaagtaaggggtttggctatcttgactcagtgcgtgttcaggagaatgtgcaaaggaagtttcattatgtgactctgtcctattcagaatggctatatgagacaatggaaatatccttcaagtatgtaaaataggccatttgaattaatttatcacctctttttttttgttattatcccagagaaatagacatcagatgtgatctgggacaaatctttagtgtgtctaaaggtttttaaaacctagatttgtagttgcttccttttaaagcctaacctatgattttgaattgttttagtgggaatgagatttttgtacctgcttttgtcttatatgtgctcccttttaaggataacattattgcagtaattattacccctgcaaaacatactcgggggggaaaagctgtctctctaggaaataggaaagaaaacaggcatatatagaatgacttttaaaaaataggaaacccttattttcacttgatgtcagcattcagcaaaagttcccacatgttcatttgaaagtgtagaaatgcatttgaacctcagttttgagagtaggggagcaaaggagcgaagccttatttagtgaagtactatcgtcctatttccattaagtgattctctgttattggtagaaagattaattttctctctaactgggtggaaagagtggctatgcattcttggggctcactaaagtacttaaagttggaaagtaaaagaaagactaaattggagcgtgcacatttttctgcacgcctggcagggaggtttgtgtgactatcttaaggaaatattagcttgtgcaccgtcagaagctgcatcctggaatcagattagctggtgttgtgaatctccatctgaactaagatggacagtaagagaatcccaatatcttagtaaatctgttacttacctattgccttagtttaataaattgattgaaattggcaatgggaacgtgctgttccttcttggtctacagatgtgagttcctgaaatccaggcagcccttgatgtctcgatggcccaatgacatgggacaagctctgcagtgtcctttcatgggtcctgtcactggagctttccatctgtaggggctgctgccagctttggagcctgaacctctctgccctccctggaacccccctccagccagaaacccctttgtaatattcctctctttcttccacagacccttgcctgctgctggggcctctgcaggggcagtggtttctcatcacgtgtgggttggcggggggcgcggtgaagagtaggggagggagagagccctggcctctggggaccttaaaactgtatttcatggaaagcctgttttccaaggcaggcagattctgcagtactacctgcaattcctcccatttggcctgttcaccaaataatttgagggggcagagctgggtaccagcctttacttagagctgtgcttctgttgaaaagtggggcccaagtttgtattaactaatctgggaactggatgctgaggtagagtctgttggtcatgttgttgtcccccaaaacttcacttcttaaaaccatgacagtttcatggttacagtgacagtgctgcttacattttaaaaatccacactcaagcctcaataagcctgaagggaatttggcctgattaaatggttctttttagttgttcgtagtcagatgtcacccctcacacacaattaatttgttcggagccaagtgcgttccacacacattgctaaagggtgagaagaggggatagcaggtgaatctcctagcaatcaagctaattatccatttgcaatgtatggtgggagatgctgaatgctagtgcaatgctagcattgcattgtgttcttaaaatgaggactcttgggagaattgggaagcttaggcacaggcaaagcaggaatttcagaaacacgggatacctccctggacccacctctgtgtgcaatgaaggcttggaattctgcttgacatgagagtgaacgggggtctcagggttcagaggaaggactgaaagaagctattatgagggccctgtgggaggaagagggggtgactgtggcactacttaggaaggggaaactttagacctcagcactgaagaaggtgcatttcaggatttttgcatgggaaatgcagagatctaagcagagtataaataataagtgaaggatgtactagcaaaatgaaatgttttgaaacagaaaccactcacatttacaatctcaacataaaactttttaattaaatgtatcagaaagctgagatttcttttattaggaaatgaggtaaaaacattttgaaaagaaaccaagtgctaattgagaaacattctaagatttcatatgttgaatggattctcattaaaattatacccaacctcacaaagctgatgtgagcctgctgccagatttacaaatctgggtctataattgcacaaagtttaaacttgccttgtgcaaggcttgctttttctgcagttcaagatacagcagcaagaggacagaataagcaaaagtggaggaaaaatttgcttcttcagtattgaaaagtactttctagtctatttgaccccgacagtaaaacttacttcactacagagttttaaaatagaaataatgacagtaaaaatcaaatctagggagtcttctggagaagagatgttagatcagcatattattagtatttatcccaaattctgaaaccttacctaaaggccctgccattagaacagagagggatattattgattactacttgaggtatcaaagtaaaaggattttatttatgtatttatttatttagagatggagccttgctctgttgcccaggctggagtgcaatggcacattcttggctcactgcagcctccaccgcctgggtgcaaatgattctcctgcctcagcctcccgagtagctgggattacaggcacctgccaacaggcctgggtaatttttgtagtagagacaggatttcgccacattggccaggctggtctcaaactcctgacctcaggtgatctgcccgcctcgtccttccaaagtgctgggattacaggcgtgagccactgcgcccagccagtaaaaggattttatagatgaaatagtatcagttctgaagatcgaatatctcttaatgaaactgaatatatttttacagttttctaaggcttgtaaatataagtgattagacagaatgtcccacaagggcagtttcttctaagtaccccatagccaaattgtaaaaccaaaggtaagtcaataaaatcatttcataagtatgtgtaacccacagtaagggctgtatttgtttgtacattacgagcacatttgtaaatgcatttagcatcaatataaactttttctttgcaaaattaagcattacattgtattaattgttctttatgggtcttaagcaacgtgaaaatacatttcttaattaaaatatattgagcatctattaaatgagagcactgtcccaaacaagaggtgggagcataagtcatacagggactgttaagacacgggacacgtctagagattagacgaacaactgcaaatttagtgggagaagccagaacattccgctatggagcccgcctatccacctgtctgtctgactgcagcaattagtggcatgcttgaatttttctctcttccatgagttgtgttaacaggtaaacaaaactaccaccctttttactttaaatagctaagtttagctgaagagaggagcatcccctcttgcaaggacactctaaatgcggtgtccttaggataaatacctacaggtggaaattaatacaggacaagtggaatgcctgagaattcagggaatgctgagtaggcagagatcagcgggcagtcagatttgactcaaggtgagaagatacaggactccatccacagagggggtgctccggatcctgggaaaggcacgtgcaaaggaagggaggctagaagctacagactgtgtggtggaaggcaagctgtccatttagtccatgtttttgccttatgttctgtgtaagacttcatgcaagacactatgcagaagacttgcacagtgccttcagggaggcaaaatccagaaagaggatgaatccgcatgctatggaatctagaaagggaggtgagcaagaatgccatggaattggggcagacattcacaccacagagtctagaaaggaggggaacattcacatcgtggaatctagaaagtgggcgaatgtgcatgccgtggaatctagaatctaggcggtgaatgcgaatgccgtgcaatctggaaagtgggtgaacatacttgccatagaatctagaaaaggggtgaatgcttgtgtcatgaaatctagaacgggggtgaatgtgcacatcatgaaatctcgaaggagatgagttcacacaccaacaagagtggcatcctcagtgggaccacctggttgaactgggccagcatggcagtgaacagggctctagactgtatggcaatggaggagatgttcccgagcagggagacagcctcgtgcaatacactgggtttgctgtagggccgttcttgggcatgcttgctatcacacaggtccttctttcttatggaatcattggaggatttcatttttagccttagcatcaggagtcattgtctgagcatttggttggatttcattatttggagacgtgtgaatgacccaactccagcagatatgtgagaccctgaggcctgcctggcgggccattgcattcctagctcgagtttatgttcttacccttgtttctctttagcttcatctttattttttattttgcttctgaattttaaacaaccttgtcatattgcatatatccttgtagaccactttgagtccctttttgggaacaaggtagagtataaataacataaaatagaatcatgcaatccaaaagcaatctacaccattccataggaagatcagaggatcagagcatgctacccggaggctgaggcccttgagctgtgccatggcgtgttggatctggattggcgggaatggtagagatagcagtgggcgggagggtggaggagtcaggcctgctggtgtgtttggagggtggaagtgttacctgggagtgggtcacacagtgtggaaactgaccaaatcctctggagtgttggagggatcagaccagacacctacttcaatatctcaggtgtaaagttaagaggtagggaagaaagcagtcttacataagggaagggagaggtgtgatgttgtggaaggtggcaggtgacattcactcaccagatggtatagccacaggagacactttgccaggactgtcttcactgtggctctttgcaggaggtgctctaattgtcctcattttccagaatagcagtgaggctcaggagtgctgagcaccttgcctggagtcacacagtagtgggaaccagggcagcatcagaaccaggcaggcggatgctgagatccacccatgggactctgctgtgtgtagttatcttggtcagagtggcgggcctgttatggaagtgaccggaagggagcgagtgacgtggaggcagagtccgtgtaaggtcctggcagtgctgggcaaaggaaatagaacatgaacttcaagggtagttttaaatcttccagtagccaaattaaaaaagacagggacaggtggaattaattttaataatgtaatttatgtaacacatgctgaaaatactaccatttcaaatgtaatcagtgtaaaatatggatgagatatttgactttattttttttctatatgaaatcttcaaaatccattgtgtagtgtatatttacagcacgtctccatctgggctggtcacatttcaagggctccatagtcacatgtggctagtggccaccatgccgaatagtgcaggtctagaatgtttagcttaggaattcaaatttaatataatgagcaaccgcaacatctattatgtctcttggccacaggagtagaagttttgtgaccttatgtcactaaggaaccagatatgatagcaatagaaaattgaatgccagcgtgacatgttcggtactagatctgcagtttttacattggagggaaaaatgtatgtataatttcctgttgagtcacttcatgcttttaaagggtaaaataaaatactgaatttcaggccaaaactctgtgtgccagctaacaaatagtgcggcttttgccggaatcatgctgcgacaactccaggcataaaaatgctatttgaatatcctctatttaaagataattccagcttgatgacaaatttcttattttgcatgtttcttgagaataatacaattgattattttgaagaacggcattcttaaagtgctagaatcccagaggaagaaagcacatcaactaaatgtattgctatagaattaacctttacaaggacatattcacactatttgatcatgacaggttgcacataacacaggcttttcccttcgtttgtgatactgaagcttatggaaaagtcttctgaagtcaatccacagtgcttacatgccatttgttattatcagtgtgctatatgtgtactatacgtgatgcgtcattgagtaaccttctacccttttaactatgccactcttttttttttaatttttatttcttgagacagagtcttgctctgttgcgcaggctggagtgcagtggtgcgatcttggctcactgcaacgtccgcctcctgggttcaagcgattcttgtgcttcagcctcctgagtagcagggactacaggtgcacaccaccatacccggctaattttttgtattgttagtagagacagggtttcgccatgttgcccaggctggtctggaactcatgagttcaggcagtcctcctgcctcagcctcccaaagtgttgggattacaggctgagccaccgtgcccagcctatgctactcttaaagttaagatttcatttaattttttgtgcaaagtaagaaacttcactagcagattcttactcattcacattttcctgaataagaaatttgtttttagttccagtagctggtctctaggcaaatttctcgtctgtggttctttgtagataagtttgttttcattatcgctagtgcataataagggaatttcactctttttattttggtttatttttcccagtgggcagtgcttactgtaaaaataaaacaaaaactgctaaataaaataagtgtggcttctctagactctaatcaccatattgaattttacacctaaggcagcacaattattggtaaccaaacagtgaaggagaaggaatattgtggtttattaaaacacccaaccatacccaaaacctctgaccaaggagcatgactgtgtgttctcgcgtctagcattatacgtctctggtgtgtagcgatgcttcattgtagggtcacgtaaggacaaatggagaagcaagactttatcttgtgtactgcaggctccccagctttcaaacgtaggcaatgagttggattttgtagttgaatcttgtttcgtcctataaggaacgtgggccactaggtgtgagccctttaggggtaactgaaattctattccaaggcctcctgcatgtccacttgatgccgtaagctgcattcaagcattgcagtttcgtatcagagtacaaatttaatttaaagtctaaattatatttgagcagtctgaagcacattaaggcttcttaaataattcacttgaggttacgttcagtgaacatgtgtaaatatgagaacgtgcgaggcaagtggtctaaacacacaatgaatacgagaccacattgatgtaagccacaagtgcttaaaatcttgtcggaaaaagcgtgtcatccccggtaaccagaacgtttgactggccatgtggctcgcagggaagggttggtgtccaggtgcctctgtgcttggtccttgcagtttgccacatcatcaagggagacctttgagagaaacgctacgtcatcagctcatgggtgtggctctcagctgcagcgccacaggggagacagaagccccctgggtgctgcctgccgcagccctcggtgatgccaaaacagccgtttcccatcagcttctcaggttgggtatctgcgggtgcgaaatggctgaaatgtactcttggaaactgttgtgtttagttaaacttggattaatgagaaccatcgagtttattttttcctttgggctgaacagttttcatatgttatagagatgtgtgggtggattcaggggcatgacaagtgactcccagtagagtcagctcatgaaggcatctaagcatcgctgagcaatgccccttcctcactgtctctgagcttctagaccttcctcctgggcacgtccttccttaagtgtttggactcacagttctgaagtgtcgtcgttagtgaggtttctcctgcagtcaacacacccagggactaaaagaaacaagccagcgagtccaatgaaatcaggctgcagatctgaagtgcttttggaatatcctgcccctgctttctgtcctctgtctggttttcatggaaatttgtgtctgggaatgagggggaatcggagtggatttgctggaggcaggtgcctgtgttctttggcccttgccattaggagtcaggaccaaggaacctcggaggaggtggaggaggaggcagaggccgtgggagatgcgatgagcacggtgcaatctttataagacagtagggatttccacagacttcctgatttttgaaaattattcataagcctgccctcatctgggattttcaggacagaaaacataccccatttactgtccacgctccataaattaccctttcagattgttgcaaagttattttttgcattctgtaatgctggcatacgtaagctctgtgattgtgagtaaaatgcctccatttctttctccagcaaggatcaggacggcactggtcaggacaacatgcggtagcatcgcggccccatttgaaatacaggctacttctccaaaaggttgggaataaatgctggcccaaccctgatttaaaaagattaaggaagaaatggaaatgaggatcagaattagttacgtttgcactggcaaaggaagcgagattaaatacttgctttcagtctttgctccaagcaagtaaaaaatttaaaaaaaagaattgcatattacatatttgggaaagttaaatgcatgcttcctttctggaatgcacaagcctatttgtaatgggctttgcaaggcaaagattgctgcattggacacttaacatgaaataagatgtcctgagaaatctttagttcatagacattaaaaaataagttgctgttttaaataaacataatcatctgcttcatctgtgtcagagtgccgagtctttatttctttcctttttattttttgctttttcagtggttttatttcttgtgctttaatacccattggcttctaaaataggaggtgacgtgtatgtgacttgttaaagagtgaatgagtgtaacataaccctttcaattcccaacttagagaaatcattttggggataccttaagcatatcagaataaaagaaaacttagtatttctgtgtcacctgaggcactggtgccaaaaccagcaagaagtagtgacattttgtaatgtagttacatttaggcttaaattagtgtttttcaaccttttttttcatgaccaacctcctgttttcatgatcaacctcctaaaaagcattttctgattttttttcctaattgtccctcctcacatgaaaatttaataccacagatatactgttttagtactttgcattatacatatacgtatgtctacatttaggtatatctgtgctttatacagaaaaggaataagacgtttttcatccttcaagaactaattttagcctccttgaggatgcatggcttaaatacgaaatgccaatacttgactttgcaaagtattctgtttaggaaaaaagacggtggatgcccgtacgtgaccttagaaaggactgaaggtggtgaggagattcaaagtaagcaaggactgggacaccagggaatgatgttctgttggttgtcgtccttgtttagaacgtggcctgaaaactgataatgagaaaacaaaagatggatgacagctcccctttgtattgttcaagcaccattaaacatgccgaatcgctgaccacatgttttccacgtatgagaaggtgacacggtacttatcaaagttatgagtggacaaaagcagaaggttgcaaaaaccagtagcctagagagagcaaggcggcatggaggctggcagccaccggtgagctgatgggagaggctgcctttatgaacttctggacctgagcacgcagccttttccctgcacgctttggatgtaacagtgcaggtcatgtggcgggactgacgtgcagcagctggatcacattgactctgatctttcccctccagtaaaaatggaaatgtaataaaacaaacaacaacaacaaagatgctgagcttaccccaaaactcaatcagaagagaaaaacacctgggccattgtcaagagaaacaaaactgggccggtatgaacatgatcagcgaatagtatttccattaaaaggcaactgactcagagatggagggtgagtgttctgtgaggcagagctgaataacccacccacgccctgtagctgacaggatcacttaagcagagttactagaaatgacccagtgatactgaaaacaggaaaaagtacatgaagggaaaagcagattcttaggaagggaaagaagtgtgtgaaaccagagcagatcggtcagaatctaacattctgtttgagtctctcctcatcacctgcagtcctaacaaatcctccacttctcatcttcaagtgagtaatggtatggcaatgccctgtcttctaggagagattaaatggtaaaggatgttaccatgagtgcagaagcgactgttttgtttttgtttgttttgcttttttttttttttttttagacagagactccctctgtcacccaggctggagtgcagtggtgccatctttgctcactgcagcctccatcttccgggttcaagcaattcttgtgccgcagtctcccaagtaggtgggattacaggtgcatttcaccatacccagctgattttttaatatttttagtagagacagggtttcgtcctgttggctaggctggtctcgaactcctgacctcaagtgatccgccctccttggcctctcagagtgttgggattacaggcgtgagccaccacacccagtcaagactaggtttctaagagaatggttgcatccaactcagaatgtgggaagtgtggtgatgctttgtgctggtcgacgtcttcctgggccatcactagagtatatgcttctatctgggggctgagatcagagtggtacctgcattaaacatcaacaagtcggctatacagagcccagctgtgccttttgcttattgctttctgggcctgtatttggaatgtaaaagggacatacattttcactgatgctttttgtctttgttgtctatgttttaagtggtgtttaaattcaagcaaatactgtttagttgtaaaagctcactctttctcaagtctttcctcccttctgtttttccaaattgtctcttttgaatcatcttacagatagagttagtttgagtcagtggtgatccacacattgaatttggagcccaagccgcagaactgaccaagtgcttgtcatggtcacgtggaacccagatctgaagtctgtgaattcttgcccttaaaaatcactaaaaatacctctttgaaatatgactcgtttcacagtggattccacagtagcaaaatcacattgtggtttatttggtagcagggtcagatgagatgatacattgcaatgtatgcctacactcttatgtatatgaaacctatttatattacaagccatatatttgtttctctatagccatagttcacacttaggtttttcttgccttttctgggtaattccctttgagcttagtaattggggccgttaactgtacaacagtgtaggaatttattatttacttatttttaagggtttaaaatttttaaaatcgtttatttttttctgagacagagtctcattctgtcactgaggctggagtgtagtggtgtgaccacagctcactgcagcctccatctcccacactcaaatgatcctcccacatcagcctcccaagtagctgggactacaagtgcatgctgccatgcccggctaagttttaaaatatttttgtagagatggggtctcgctgtgttgcccaggctgctctctaactcctgggctcaagagatgctccctccttggcccctcaaaatgctaggattacaggcatcagctgcccagtgtaggattctagaaacattaatgatccttaccacctggggtcaatgatggcatgaagatcacatctgtattcagaaaaagtgaatatcaaatacatgttatttctaggccatttcagagttgtttcactgcttggctcaattttaatatgatttttgtatggcaattttttcccccaaaatatttaattgatataatcctgataaataatcttgtaaatattgtgataaccttgtcttaatagaattcagcctaagttagttcttccttggactacattgaaaggaatccagggaagacccctgtcataccaaatttcaccctttgctaattctctaggtagaaaaagactgtgttatacgttgatctccttataaggtgtttctacagaccaagatgtctgcaggcaatgtttgggaaggctcttgtttgctaagaaatcacacccaaatggaaaccttcagaaaacaagtggaagccaggaaaagtgtccatcactggaaagttgaaatctcctttaagaaaatcaatttattaaaaggaaaatgtcttcccatcttgttatagtatgttataatatatcgaaagttcttttaaaagggattcttctacttagtaacaatatcatcatggtggtttgcagacagaatgtcatgctactaaatggtgccgcctcttccattggatttcagaagccagtggctgccctgctctgcacttcttcctcttcctggcttgacctcaattcagacctgtgtgtccttctgcacagtaggtcccaggctaccacctggagaggggaaaaagtggctatgaaggcctctaggaaaaaaagccaactccactaaagtttgttgagagggtgagaaagaaaggaggggagagggtgagcagaggggactgtcccttgggaccccagcttcccaagttctggcagtggatggtgtctgtgggcacttggttttcagttactcactgcctggacagtgtgtgttcttcctgccccacgtggccagccaacatatggctcaagcccacagttcttattttcctgtgtttacttgaaatctctctgagcacgtggaatttacagaaacatgcacttcaattatcctttacattgacccaaaatggtactgaggaaattttccagtggccctgctaaccctgaaaatggcaacagacaggtgcagaccgatgcattcccggtggggcggaatcctctttgcagcttgtgagtgttgcccctgtggtttggaaatacaggggaggactgaattgaatgagttcttttgttttgcggaacacctgagtttgtgtgtgtagcttgaagacccattctaccacaagaaacaaatttgcctcttaaataaaaggaacaggaaatagcatgttgttggctttggtgtgcatcaaggttgggagaaggaggagttgtgaccttactctgtcccctgcagcctcgggcctgtgtgtcctatgagcgagtgtcatggggtgcacgtgggctcactggctgtgtccagatagacgtttttgttcccctgcttcaggttttagtcctgagactaccaattaaaccatcccgtaaatcttccattataggtagtaaaacctaattttggatttcctgcgtgctctggtatcctgcctgattgctaccaggctggacctgtgaagcagacagtacgtgtattgtgccacgtgggaaagcccttttcttacatattcgggatttagtcttaattccctgactgctttcatcttaagttttaaaactcctgaggatagctatctggaactctgcagttgacttaattcttttcagtggatcactttgatgcaatgagtaagggaagggggcgctaagaaaagagtaggcataaaagtgggtgaagtaaaacaccaaagccactgtagctctgccattcttgctgcgaaggcacagggtgtgccctctctcagtgtttcatactccatcatctgtaactcagcactttcctcaagctggggagtaacagctgcttgggaaaacacatacatattttggaagtatttgaatcaatgccttgtttctacccctctcctccttcagtgacccaatacctttgaccaatgatgctgaatggtttacctgggctggaatctgggggatcaggagtggtgctggtgacttggtctttgtccccctcatcccttgcacatttgtgaaggtgaacttggaagatcagtgggtgtaacagtgttgcaaggatgttctgagtttgaggcagccagactttgttacctattaatacaaaggaaagatgaaacctatgcaaaagttgttcttcacgctggagacttggcaggatgtagtgtgctctgagaatctgcaggtgagagtttgagtgggtctgtgtatatggatttagggtggggtgtgaggtgaaatctatatgaacagtactaaaatgtttaaaacttacaagtgatatataacagcatttttgaactttagaagatggtgtcaataatactttgtttaccgtgagcatacagatgaacaaaagtatttaaattaaatctttctgcactcagacataatggctattgaaaagtaatgcatttcattccagatagtggaatttctctcttatacacatgtttttccccaaaggggatcatattatatatacacttttatatatatgtgctggcacctgttttgttcacttaccagcacattagaagtatctgcccatgttcataggtatgcttaatgatatttttaatgccacattacttttaaactgtctagtattccatcgtatgtctctgtcattataaatttatctacctagtcctcttctgttgagtattcaggctgtttctagttttctatattataaaccaggaattcccaatcttgagtgcagaatgcagatgcccaggtcctatcccaggccaattgaatcaggctgtcttggggtggggcccaggaatcagtattctcacatgcctccaagatgaaaattactgtttcaaaccatgctgtagtttatcagactgagatacgctcttgaaagtggaattgtgtgatgaaagatatgtatctttaatcttttgatatagactgacaaattacctttcagaaatttgttttttttttcacactaattttcactttaagctttaaggcttttaaaaggtaaataatgaaaaaatttgcatgtgcatttggaagaggtttatgtcatactaaataattatgttgatctgtttgacattgcttagtttattttgtattataacatgactgtgttactaacataacaaagggggacgtatttggtgcctctttccggttgctttagtgagactgtggtgggaaggggcagatgcaacagccctgatgatgagtgtcttggttcattcaggctgctataacaaaatactgtacactggatggtcataaacaagactttatttcacatagttctggaggctgggaagttcaatgtcaaggcactggcaggtttgttgtctgttgagggcccattttctggttcatagatggcatcttcttgctgtgtcctcaaatggtagaaggggtgaagggagctctctctggtcccttttataagggcattgatcccattcatgaagggtccatcctcaacacctaatcacctcccaaaggccccccagctcctaatgccattaccttgagggttaggatttcaacatgtgaattttgggaggaagcaaactggtggtacatgcaatgagcatgggatggctctgaagaactggattttatgccttttctgggttcacaactgactctcagaaaacggttgcctatctatgtatgcgttagtttattcactgtgaaattttctacatgttttatcactgttctattctagttgttatatttctcatgctaatacatagttgtaaaagtcaaatagtatttctgcgcttataatgaaaaatagcagttctctgccttccattttcccagagagccccctttcctagaggtaactgctgtcctcttagctgtttcttctgtcatttacctccttgttgatacatcactgcgttttcatgagcttttcatttggactttgtattagtccattttcacaccgctgataaagatgtacctgagactgggtagtttataaagaaaaagaggcttagtggactcacagttccacgtggctggggaggcctcacaatcatggcagaaggtgaaaggcacatcttacatggcggcaggcaagacagatcagagccaagtgaaaggggtttcccctcataaaaccatcagatcttgtgagacttattcactgccacaagaacagtgtgggagacaccaccccatgactcaatcatctcccaccggctccctcccacaacacgttgaagttacgggagctacaatttaagatgagatttgggtggagacacaggcaaaccatatcagacattatcaattttctcctaaggtagatgagaatttagctcatgcccccttcccccatctcctgtttctccatccttccaatgtaggtaaatcataatgttggttaagttgatatgcatttgtaacattattataactatgtaaatgttacttagaactgagtcatatagtgtgctgtaatgttcgattttttcaaaaacaataacttttcattgattttcaattgatttttcattgattttcaatgattttcaattgatttttcattgattttcaatgatttttttattgccttggtttttctaagtacttacaataagactcccttaaactccttggcagaaccagttcctcttttcagtgtgttagaatgaatttggtcatctctcagggtttttattgttttgttgtgggggagggtgctttaaggagccctgtgctcacagatggaaccggctgtttccaggcgtggctgtcctggcatctctgccctctggcaccctaggattctgttggttttcatgctgggtcccctgtctccaggttatcctgtcagcctcatggttggtgtagttcttcacattgatggcttggctgggcctttgattccctttaagaaacatttccctcacgatttggaaagtgaaagtgatgcttcatagactaccagctcttattgttgttatcaagaagcttgggatgccatcctggttcccatttctcttctctgaatgttttaggtttttctctttcatctcagtgtcctgaaatgtcacagagatgtgccttgtttagggtcttcttccttttattatgtggggtactcagtgggcctcttcagttgtgggaaatttttctgtatgatttctttgagaattttctcttccatttttaaatgttttctcttcttggaactcttgttatttagatgttgaacctcctctctgatcctttttattcaaggcatctttaactgtttttttaatggctgtattatttgttcttatctttaggatcttaatgatagtttttttttttaaagttaaaacatctctttttgctccacattttttcttcgtgattgttagattttggtcatcatttctaatgcttggaagtttttcacaagtgtctggtggaccttggatgctcttcactaggaaataattcagaataattcactaggaaactgtgtgcccaggtggggcttgttggctgggggtgtgtgccgtgatgggtatcagcacctgactatgtcattggggacccataagtgactgtctaagtagctctttctcttgggttggtcagcatctcctgggggagaatactgctgttgtcagctgtggaaagggtggtggaatgagggtggggttgttagagcctggctgcagggttctgagggtgaagtagagggaagatcctgggggaggtaccttgccattcacttggtcccccttttcagtatgttgcctcattccctcactctgcagagcctggagtccctgatttctctctggagaggaaccctaaattacctgctaggcacaggatggttacctggctgcaggggatcagaaaggggatgtgggaggaggagggagcacttgaatttcccctttctccaacactcatacactctcatgttttcagccccattccttgccctgctcccaccctctgagtgacctcaaatttccaaagctctcagggtcgtatgttgcaaattgcctttccctttactgactccccccatcctctggcagggaggtcccctcactcatcaactgccattctcttatttgctttccatcttccaaattttgcaaacatcttccacaggctgttgtctcttctttcttccctttgtccatttgaatttctacttttagtgatattattctagaggtaagcccacaagttcaatctgcccttttttacctggacctgttacattttagagatgaagtgagttgcaagtcttgttggatgagtgctgcattctaccacggggtgcagtagttgtaagtgaggagggccagatgcacgcaaagtgataagatgatcatgatgaagctcacgcttatagaatgccgactgtgctgggctttacctggattaactccccaaatcctcacaacaacccactgggaggggctctgttattcccaactcacagagcaggaacctgaggcatggaatcatggagtgacttgctcaaggtcccatggggacaagtggctgagctggacattgcacccggactggcgcacccagatcggaggagtttcacaaaccaggcccccctaccagatcttcccctcagcatttcgagttgcatgtgctgtgtttcacaccttaccttagatcttcgttttctctgatatgcccaatgcattgtgctcataggtttggctgtgatgagaactctcttgctcttcaatccactcagttaacatttgtgtagtcctggatttcttacttttattatctagaccccagcataaacttctaatgggcaagtgggaacccctgttggaacacacacttgcatacatacacatgtgtacacacacacacacacacacgcagaaaaagaacttgtgaagagacagcataaaactaacagataagaaaaagacatggatcacaagactaaggacaaagcaagtgaacaggctaccacagacagttgatattacagtaagttaaaaacgaggaaattattttaaagtcttttattattattaacagtattgatgattaaaattataattaataacattaacataattttagttgctctttcttaggatcctgtagacagtagcacagttgtcaggacaatcttgcatgatggacatttttatcctcattttatgttgaggaaatggaagctcagaaatgttaggtaactttccaaggacacacaattagtagtacagtgtctaattccaacgtgatcactcatttcaccacaatagcttccaaaatattgagcccaagtaagtagaaagactattttgaacacccagattagtaagaaatccactggattgtttcttaagctctgaatcaaggagtttttattcagtcaggttccgtttgccaattcgcaggtgggtcattttctctggcaagtttcaacagaaaggctggcagaaacacaaaatgacacacatatgggatgcacacacacacacacatttcaggagactgaagtctgggaaagcaatggttttgagatgctttttacactgactagaaagcaaagagaggctagtggctgagcagaaggatgctgtccagatcttcatctagactagattatcaccagccagaccagcgtgcggttccaagcctgcctcccactgggcagcatttccacaacatctttcccctccttggggctttatttccatccccatttaaagtctcccatttgttaagaatccatggttcatgtttgtaaactgtaacagtgttcgcctcttcctttttgacagtttgttgtattacctaataaatatttttgaataaacatttgcttccttctaagcagggggacagccaggcagtgtccagccctctattagagtacagggccccggaatccaggttgagagagttctttttcctgtcaggctgtgggccgcagggttgggaacggagctttttgggtgacatcctgcagagctgctgcagccagcccaggtgggagaggagaggttggatgggtttccaggggccagagtacattcttcctgataatctccttagaaatgagaaaaagcttccctccggcttttatagttccagctttcatctgctcttcacccacaggtgcttcattccttggcttgagtaaataccttcagggaaaaggaaccagatgccactatttttaaagctgaggaattctttgttcaaataaaattttgcataaaagcccaataagtagcccttcccccagagggtgaactcttttggtgggagccggaccctccttgccctcctgctcctcctagcttctcttctcctggagacgggtgtgaaaactgctagctgacctcttctgtgcatttattgtgtattagttcattcttaggctcctataagtacataactgagaatgggtaatttatgaaggaaagacgtttaattgactcacagttccaacatggctggggaggcctcaggaaactttcaatcatggcagaaggggaagcaaacatgtccttcttcacatggcagcaggaaggagaaatgctgatcaatagggggaaaagccccagataaaatcattagatctcatgagaactcactcactatcttgagaacagcaagagggtaccacccccatgattcagttacctgccctggtccctcccatgacacatggagattatgggaactacaattcaatatgagatttggatggggacacagccaaaccatatcatcttgtatgggaaaatagagacctagaagaatcacctcccccaaattgtggaactagtgattgcaagagctgggaccctagcccaaggcctcatttcctgaatattattcaacctgagtcatgctagggtcagctatgtttggacataggtggtaatagtggcggactgctgccaccatgacctcaaatgtcaatggcccagctctcaactctgcagtcaaccttacctaaacacagaaaaggttattgcaaagttatatgccttccagattgtattttatgctcaataattgtgctttaaaaatatcacattgaatccttttgtaacagtttttggattttagaaatgagaagtttattattattatgcttatttctttgtttccttaaaggaatcatgcctgtgaagtttcctcttggttactttttcatttatcgaattactcactatttctttatttatgcatatatctggtgttttttggtatctcagagtagtttgattgtttttgctttttagtgtgttatatttgttacaattgataaatctaggttggcacatcattatcacctaaagtctatagtttacattagggcctgctcttggtgttgtatgttttatgggttttgacaaatgtgagcctactattacagtaggctatactattatagtaggctcacatttttcagaaaggattcagtatgggtctatgttaaaaacagatcctactatgatagtaccatatggaaaagtttcactgccctaaaaatgccccgggctctccctattcatccttctcttcctcctcactaacccatagaaaccactgatctttttactgtctccttttctagaatatcatgtagttggagtcatatagtatgtaggcttttcatattgacttttcccttagcaatatgcactcaggattcctccgtgttttttcgtggtttggcggctcatttcctttcattgctaaataatattccattgtcttgatgtgccacactttgtttatccattcacctatataaggaaccttggttgcttccaagttttagcagttatcttcatgttcttttcaaagcttcagtgaaaccctgtaggcaaggattctacagtataccttccaggtgacatgctgtgccattgtaatcattattgagattctaaaaatggatcatcaatctgcatccatgcaaagggagctgactatttttaatagaataagtgttacagattcattataggtctgtgttaaaaacaatggaatattgggtcttcgtgcaggcaacatggaagtcagtagtgaagattttcttagcattctgtcctgaagtcaccctgagaatacagatgttctctccacttgatgtgccttaaaactggactcgaagagtttttggttggaggagaggttgattgttatctacaccagatatttggggtctagttagaagtttcttcttggcattcttaatgctcacattttctcctcctgcatattcccagggacagggaacttactccctcataaaatagccattcccgttatgcacagctgtgtttgtgagcgtgaactttctcatatcgacctcaaatatgcctccatcatcgtatctacttttccctcctcgaataacacagtgaagtggcgacttttgctcataatggggactaggaacacctagaatggtacctagaaatcttacagtgaatagtggctgaataatttcagaactgaataaatgaatgaatatttgacttatcttcatttatttcaaagcagtatttccttaaacttctcttttgcagataaaatacaactacttattttaacctgatttcctacaatatgtattttagagttatcatattggttttatttttgtggacgtattattttttatcaatgttcttcttagagaattatatacagaacaggccctaggaaatctgagaccattatattttgtgatctgaaccttatggttcttttgaggcagcagctttagggcagcccatcacactgcctttggaaacaacctgatttttttttttttcatatcaactgctgccaatctacatccctctcattcagtaaaaagaaggacctttaaaacccaaaacaaatgaaataattcggcacttcaaattgtatcttatgaaattgaaggagatgcagatgatggttttctcagacatttattttctactttttattttcatcctggtaaggaataattaaaaaatagatgtgtaaagcttctaaaacaggcctcagaaaacacagaaaattgagaaggcaaaaataaataagaaaacaaaactccatacaaacaaataaaaaggcacccaaccaaacataaaataattcatgtgtgctgatatagcatggagcagggtatgtgaattcgttgataacgatgacatttgagaaatgctcgctcgtgccatccagtgttgtatgctttacacacatgaactgatataatccatacaaaagctctatgaagaatcactttttaaatgattttttttctattatggtaaaaagaaatgcataacatgaaagttaccatcttaatcatatttaagtgtagagttcagtagtgttaagtattttcacattgttctgaaacaaaactgaagaaattttccatcttgcaaatctgaaactctacactcagcaaacaataactcccctctccctactttctccagcctgtggtaacccattctattttctgtttccatgaatttcactcccttagatacattatataactagaatcataccatatttatcttttttttgtggctggcttatttcttagcttaatgtcctcaaggttcattcatgttgtaacatgggacaggactttcttactttttaaggctgaataatattccatggtatgtatattctaaatttcatttattcatccatccatggacatttgggttgcttctacttcttggctattgtgattagtccttccaagaatgtgggtatgcaaatatctatctcagttagtttggatatatggacacggaagtgggatttctggaccacacagcatttctggttttaatttttgaggaccctccatactgttttccagaggggctacaccattttacaatcccactgtattagtctgtttttatgctgccaataaagacatactcaagactgggtaatttataaaggaaagaggtttaattgactcatggttccacatggctggggaggcctcacaatcatggtggaaggcaaaggaggaggaaagtcacatcttacatggcagcaggcgagagagagagagcatgtgcaggggaactcccctttataaaactatcaaatctcgtgagacttattcactatcacgagaacaacacaggaaagacctgctctcatgattcaattacctcccactgggtccctccacaacacgtggggattattacaattcaaggtgagacttgggtggagacacagatccaaaccctatcacccatcaacagtgcataagggttctacctcctctacatcctgaccaacacttgtttttaatttttaaaaaattatagtgttcatcctaatgggtgtgaggtgacatctctttgtgttttcaatctgcatttttctgatgattagtgacattgagcatcttttcatatgcttgtagaccatttttttaatgaggatgcacttttactgtgcccattttatagataagaatgtagaggcaaagaaaggttagtcagcttatccaaagttatattcaggcgaagtgatggaatcagaatttgcatctggatggttggctacagagtcctgctttgcaatcactatgttatacccttcttaggggagccatgttacaagatgggaggatgtcctcagatgccgttccttcaagatgggtaataaatattaaatataagggaaggtttcaagtgctttagaccttgagcaacgactttctggaatgatgatgttaatggagtgatgattcaagcagaagccagttaaactgggtttccaaagtcaagcacaccctctagaactgtctgtgggattcggtttgcaggtctcagggctgacgtgcttcctgacttgagccacaaacctggcaggagagaggagatgccaggagggttgagctgggatgagggtcacggctaccaagaggtcaggataggggtgtgggaactttttgcctttatgcatagattgctgccaaaatgaggggtgaaaacggtacggaaatcaggtgtgcacacagtaatgcagagatgttctagtgttacagaggattacatggattttatccaaaggaaaggaaagtagtaaaagggaggtcaaaattgggaccacgccatcccttaaaggacgggaaggctataaaaatcttcccaggctgttagttatttcatctctgctgaaaatgacatatatagcagcaacagaatgttcagttaccactaaaagcaaaatttcccccaatgtgctttaaagagacgagacgtgtgggcgtttagtgttactgattcttcctgattcctttttttttcaaccaaattttctgtgactcatagaactcctattctctctcttaaccatgtgagtatgtgaaaccatgtacttggcccgcaacatttttaaccaagacaaccttaatgggaaatgaagtgtggggaatggtgtgttctgaaggtgccaaatcttttttctcaagggcaagatgcagtccgagttgaaggaattggaagagggtgtgtggtcaactccccggaaaaagcaaatatttgttacccacctgaaacattaggaatgagccagtggtcacatcctggtttctgccaaggctgaatgcagcccagattgtcagagctttatgctttccattccaggggtttcaaattctacaaaatgcataggatgaggcattaagaaagtgaccctttatcttcatttttgttcttcttcatttattttttctttgtagtgcttctcagtttagctctacttcttcctgagggtatatggtgaataactatgtagctcacatccctatgaggtctgaattcctcttatgttgcaaagtgagcttaacaaagaagaaagtcctcagaaccatttcttaaagcttcttctttttgactgtgatcctaggaaaacataaaggtgtgcagtcctgtgctaaaaaacatttgcactcaaggtgattttcaacttatgcaggattggttgttgttttcagtacttgtttgtctcttcttcctcaatgttagctgaaaagatgggtgcccagaacaaagtcaacattgcccagcttcccttgaagccatgtgcaactatgtgaccaagttctgaccaatagaatggaaggactgtgtgccacttccagaaagtatccctcaagggaaggttgaacttccaggtagaggagtgcccttgtccttcctcctcccacctccctgttgcatggctgagatgatgactggagttggagcagccatgttggatcataaagaggaagccctgtgttgaggtggctgaatggatggaacctgggtccctgataatcataccaggcctatctgcttgttttcctatggtttaagccaccattattaacaagaaatctactgtggtaaaacatacataatataaattttatcatttatctatttttaagaatataattcaggggtatcgagcacatttgcaatattgtacaagcatcaccacatcatttccagaactttaaaaatcatcatcccccaaaaaactctttacctgttgaacactaattcccccttccccctttccatagcccctggtaacctggattctcctttctgtccctgtgaacttacctaatctaggtagctcatgtaagtggagtcatatgatatttgttcttttgtgactgacttacttcactttgcataatgttttcaagggccatccattttgtaacatggattataatttcatttcttttttaaggctgagtaatatgcccgtgtatgtatagactacattttgtttacctgttcatctgttgatcatgaataggttgtttccacattttgtttattgtgattaatactgttatgaacattgatgtacaagtatctgtgtgaattcctgcttttgattcttttgtgtatatacccagaagtataattgctggatcacatggtaattctatatttaatcttttaagaactgtcatactgttttccacagcagctgtactatttcatgctcccaccagcatggaacaagggttccaatttctccatatcctcaacaacacttgatatattttttttctactggccatcctcatgagtgtgaagtggtatctcattgatgttgagtatttttctatgtgctcattggccatagaatggtctttggagaaatgtctgttcatgtcctttgcccatttttgagttgggttgtttgtttttaagccaccattgtttttaaaaaatcaatgttatcttctgtcacttgcaactaaaatggattttaactaatacactgccctgctgctttggttgtgatgagaatccattgagtgtggaaaggtttgcacctttcatagagacctagtgtatcaatgctggaagccacttaaaattgcctctggtttaggagcagagagaatgggcaatctgccttagtttacttccctggagaaagaaccagggatggaggagcttatgtctcctggcctctcatccaggtgtttccatctcactgcctcccacaggggaactctgcaagcaggcagctgggagcctgtgttcccttgtccaggggctgcaggactctgtaaatagtacagtctgtgcaggaaactctgctattgaattgtaaatgttattgcctaaaacaggtcatctcttggctttaacagtactagtatactgataacggcaccaatgataatgataatttgtttagaaaggtttggaggaaagggttactggggaggccctagtcctctaaagctgtgtactgctgctttatctcttgacaaaagagaaaaaagttttaatgcagatctcatgaacagggatggtttaatgagaaatggtgtgaagatttagtctgtttgttgcccaccacaaactcagccttgttgactctggagcacgaaaggtgtgattctgagagcttgtagcttctggagggaagggacagggaagttccatgagagaagtgggggcatgagagtgcaggtgtggtatgctcactgtggggagggagccaccaggttccagacagcaggtctctgttgtgcttcacagtttcccccaggagggggactgcagccagctctctcttttctccacgcagtagctgtgggtgtgcaggtggctattgagcagggacattttgtgttttagatcgacccctccctcggtccttagatcatcatgtctttcattgatgtgttagtcattctgggtagtgtatggagcccatcagtcattaatgctcatgtggtcccttagatgggcaaagctcttgacaatgttttttaaatggttgaacttgtgtgacccttttatgactctgtggtctttgtttctaatgacataggcagcattcagggtagaaaaacaactataaatacagagaagcaaaagaaagaaaaagcaggctgtgtatggtggctcacacctctgattccagcactctgagaggctgaggcgagtggattctgtgagctcaggaatttgagactagcctgggcaacatcgcaaaaccctgtctctacaaaaatatacaacaattagccagctgtggtggcatgcacctgtagccccagctactcaggaggctgaggtgggaggtgtgcatgagcccaggaggttggggctgcagtgagccaagatcacaccactgcactccagactccaacctggatgacagagcaaaaccctgtttcacaaaaaaaaaaaaaagaagagaaaactccttgtcatttctctccagagttagccactcttattattttgttttgtatattcccagactcttctatgcatggttatataaagatatacatcaaaaaattaccacatccctttcttgcataggagtattaagatattttcaaatactgaggatgtcagacagataagaaagtctggctgtctaattcacatctttaaaaacatgggacaaaactcgtttcctaccagaacgctaagagttcatttcccatttcaaacattcttgtcagaatctttccccataacagccatcaagccttgcatgcttctacggttctttatgttcatcttctataatatcacataataaatgtaaaaaccttgaatttaatgcattagtttttatatactatgtctctaagcatgttgttcagctgattttttttttcctcctggcaagactttctgaagaaaagaagcaggttgttgatttattttcattgttatctgaataatgatttcacagtattttcctgtcattacagctatgctatcagcccattcttaaaaacactgatttgtgatattattaaaaagtggtactcaagcttcctttttttgggttacagattcaccgaacatttccaagtagacttctttaatgtagttttacattaatgtcttggcaattttatgatttttgtttgattgttcattttgtttgtttttggttttagtaatgtaagtgctgctttacaggaagccttaagacattcatttttagacatgaaatattcaacatctacttttgttgtctttttaataatactcttttttgcaaatttttttttattctcggtatttaaaaaatttttttatgtaaatgctactcaagttttgatagtttcattgttttgtttgccaatacatttgttcaagtgacctacagtgtttttagcactttgctatcaattatggctgcaaaactgtagtttatggctacataaactataaaaatttgtatatgagggattatactttcaagtaaaatgaatacaaaattttttggctttcatttcttcaatgtcaacttctttgtcatcatttggttactgtgattgtcacattcaaaaaagatatatgtttttctgaccaaaaagaggccatcaatcaatcaataaaggttataaatacataatactaatttgacttcccttatttagccagtaatgttaaactataaattttaaaaagccataaacatttaattaattaaattttaattattttcataacgtgcttcccttttctcagattatgaaaataagttatgaaaataagtgcttcccttttctcagattttcatataatttgatttatccttgacaaactgaccttaaaaggtcacatgttgtaatgtggccctaccaatgagtgcccaaatgtgagtaatgctgcagtgtctgaagtggtcggcaccttatttagaggaactggagcactgagctcatactgatgtcacagtgatgtcaacttgctctaaaattttacaagcccttcttactttccgtacttctctcatcatggtcagtcaacattttgcaaaatggcactggtctatggattacactcagtaccactgctacagactgtatcatggtttgcaggtgactcagaattcagtccttccacactgaatattattatcatgacattttgggaaaagtgagtgttggccaaacgtggctcacgcctgtaatcccagcactttgggagaccaaggtgactggatcacctgaggtcaggagtttgagaccagcctggccaacatagtgaaaccctgtctctactaaaaatacaaaaattagctggaaatggtagcaggcgcctgtaggcccagctactcaggagtttgaggcaggagaatcgcttgaactgggaggcagaggttgtagtgagccgagatcacgccactgcactccagcctgggcaacagagtgaggcttggtctcaaaaaaaaaaaaaaaaaaaaaaaaagagcttcaagtattatttttattgtaatgggctttttaaagctgcttcaatgagtttcatctcagattattctaaatacgcaccatatcgccaatcatattaattagtaagtatctaagtaattgagaatgctttgccttcaataaaaaagctggtgttgtatcctggaacctgttcaaaaataaagtcttgatgtgaaaatgaatataggttgagatcttgagatcaactgtcagaagtcaggctggcttgggacttcctggaagcagcaccaggctctgcgttcaagtttgaggagcgttctgccttctgctgttgtggcttcctgcaatttaaggctcgctgcttcacactcctggtctagcaccttgacagaaaatgttccctaagggatgtttcagcctctctcctggagaacaaggccatgaataaaagaggaggccaagtgggtagcattttaaagatcaaggattcttaaaaactaatggtacaatgaatacctgtttaacaaacctgcgtgttctgcacatgtatcccaaaatttaaagtaaaattaaaaaaaaacaaactaatggtgcaagtagaccaaataactctgttcttcaaacctttacctctaagaggtgaatttatatatttttaaaattttgtattcttccatcacaagcctgtaatgctgaagatgagtattctgtatctaaggatgaaatgagtcagcacttttttgaagtgtacctttatctttaaaaactacagctttatgccatatggtttggatagagtctatttctgctctaaaaaaaaattctcaaaggatgaaggtgggttgatgtgtgaaataatgtacttcttcctcaagcagtgatgacagcacattgtcttttgggacaggatagcaggaatttaatattaatatatatttttaatttcatacatttattcattcattcaacattctgaacaaaaaattttctatgtgccaggttatttgctaaatactggggatattaaaataataaggcatattctttttaaaatgcttatagtctagtgggggagatagccacataaacagaaaactttaatacattgtgataagggctgtgatgtttcaagtattattctaggtgctttacatttattaaaatatctattccctaccacatttgcctcaagtgagtgcttatattatcccagttttacagacaagaacattgagatacaggaaggttaagtgtccaaggtcatatagccagtgagcggtgctgagattcaaatccaggtcgtcccatcacagaacctttttcccagccctacgctgtgaacggaggtggacaggagctctatggagaccacagaaggggtgtctcccagcagagctggtgcatgaactgtgtctaaggggcaggcaggagttcgccgggatgagtagggaggagagtttttttattttttgttttactttaagttctgggatgcatgtgcagaatgtgcaggtttgttacataggtatacatgtgccatggtggtttgctgtacctatcaccccgtcatctcggttttaagccctgcatgcattaggtatttgtcctaatgctctccctccccttgtcccccacccacccccgacaggccccagtatgtgatgttcccagggaggagagtttaagtggcgtatgccagagcatgcagccaggtgcttggtgtaatgtggagacagccagggctttgccgaggctggatcatgggatgggtggtggagcatggccagggatgatctagaaagtaggagtgggggctgccaagtcatgtggttaggctcacgaggaggttttcttgaaggcttcacatatagcctgaaggatgaaggccgagatgctttaataaataatttcactattccaaatggaaaacatctcaggaatgttcttatttgatatgtgattactgtaactctgggatctttaaaaaaattattgtaaaacattagcttgggaggaaattatgaacttcaattttgtttcatcaaagaaattgcagagatggccttgaagaaatctaatggctgttaggtattgccttgtttatttatggaatgatgctccccatgggtcaaaggcaaggggcccacatgcacagattcattttaagttcgacccctgctgggctggtggcaacctttgccttacttacatgtttgctgtcagtgctgagcaacttaggtgtttcatttctggagggaggaactcactctgagtctaggacctcacgctctgctaccaggacgcctgcaacaaactaacacacacatgagctctgatgtacggtgtgactggaaaatatactgtgttattccagtggcaaaacccccaacactgccggatggggcaaaaagtgaaattgtgttttgaatttgatgaagatttcagaggtaaattataaaaatcttaaatttggccagtctgctccatgtttcaatccaatatgcagggcaagagagatgaatcttggtgttcatttcctttatgtttatttcatgcaaattttatgtgtatgtgtattgtgtgtgcagtgtgtgtgtgtgtgtgtgtgtggtgcgtatgtggtgtgtggtgtgtgggtggagtgttgagtatgtgatgtgtgtgggttatgtgtgtgctctgtggtgtgtatgcatggtgtctgtgtgtgtgtgatgtgtgttatttatgagcatgtggtgtgtatttagtgtgtatgtaatgtgtgtgtgtgtggcatgtatatgtgatgtgtgtggtgtgtgtgcatgatgtgcgtgtgagtgtatggtgcatatataatgtgtgtggtgtgtatgtggggtttatgtatgatgtgtgtgtgtggtcttgtgtgtatgtggtgtgtgtggtgtgtgcatgctttgtgtgtgtgtggtgtgtatgtaaaatgtgtgtgacgtgtgtgtgtgctgatgtgtgtgtgtgtgtgtgtgtgtggtgtggtatggctgagcatgtggtgtatgtatggtgtgtgtggtatatatgatcatgtagtatgtgtggtgtgggtgtgtggaatgtatgagcacatggtgtgtatgtgtggtgtatatgtgattgtgtgtgtttgtggtatggtgtgtatgtgatgtgtgtgtggtgtgtgtggtatgtatgagcatgtggtgtgtgtggtgtggtatttatgagcatgtggtgtgtgtggtgtgtatgtgtgtggtatggtgtgtatgtaatgtgtggtgtgtatgtgacgtgtgatgtgtatgtgtgtgatatggtgtgtatgtgacgtgtgtgtgtgattgtgtgtggtgtgtgtggtacatatgagcatgtgtgcgtggtgtgtatgtgcgtggtatggtgtgtatgtgatgtgtggtgtgtgtgtggtgtgtgtggtatgtatgagcatgtgtgtgtggcatgtatgtgtatggtgtggtgtgtatgtcatgtgtggggggtgtgtgtgtgtgtgtgatatgtatgagcatgtagtgtgtgtggtgtgtggtgtgtgctgtgagtgtgtgtgttacctactgatgttgaaagagacctgggacccattccctcggcgcggcagagccctgctttcctagctgtgagccggccttcagtcctctccactgacttggcccggaaagcagcaggggccctgtttggtgagttacgtttacacgtggagcatgagaaggcccacatttggctaaaaagagtacaaatctagtcccctgctgaatgaaggcctgtgtggttgtgcactgcacagtggtgcctgagctgctatctgacagcacgtggtcacctttcctcccgtgcatgtcctgggacagctggggctgcacctgaccatctgggtaggactcaggctcctgcaggctcctggatcaggctgccttcctgagcagctgcgtgtgtttacctggagatccgagagagcctctgtctcctgtaacttcgcaccttgtgtactcagagtcatctcgatgtcagccattttttcttcggagcaggttttcattgctggaaaggcatgagtggggactcaggggagcatctaagtagactctggaaattccagtggtaaactcggagcatttttgtatattgccttgggctgaacttgcatagccatctggaactctcttaggcttggtggcctgatatctatgagggagactaaccctcctttctggggggatctgccagaagagatgggttttatttttgtattagtcagcttttgctgcagtagcaaatgatggcctccaaaagtctcagtaatttgtaacagcaaccacttgtttgtcactcagaggacttcaggtccctggagctctgtcggactcagctgggcctaatggaggtccctgtgtcttttattctgggtcccaggttgaagggacagcagctctctgaggcatgctgctctcatggcagcggggagatggcaaggggcaagcagaaatgcatgattcctcttcaagttgccacctggaacggacacactttcacttttgctcacttttactggtcaaagcaagacacctggccaagcccaaggttcctggagaggaaagtgcgctctctactgccaggcaagcacaagtcacaagatgacatgtggagctgcatgaaaggaggtaggacataagagttggggacaataatctacactaatctgctggaatttatttatcacagaagggggtagtctgttgcttcctaagtgatctcatcccatcccatggcttccaatcccacctacaccgatgactcccagatagttgcattcctgggcttcccttcacactcaaattcctgtatccaaaattttacttgacgtcttacttggatacccaataagcatctttgaaatcctccagtagttcgagttctctcaataaatgctgaaaactgatggcatcatccttcactttttttctgggaagccatgagtaaagtatgtctaaggtccttcttactgaacaaggctgtgcttgacagaatgtctagaaggagcttccaaacagattctactttccaagatttttagacctgtcttgttttaggactaaatttaccagcctgctgctgcggaaccactctgctccccaccacacttgtgtactgggaaacttgatttagcctggtggagagaaagcctgtccttgggcaatagtgaatgatagagtccacgtttaggcctgcatctttctttctccaaaatccatgcttttcccactacacaaatgtcattgataataccagctactcatggcatccttaaaatcttggtgatggggatattttattggttaggaatctctatttttaaatgtattaaaaattccattccttacctgtgagacaatgtaacctgtaaaagtaagtaagaccattgttcttttttattggtcatgttcaaattacactattgctccttcctaagcagacgagctggctgcgggcctgcagagtgtgctggggattttgcagttagaagccagaagtcaggtttggccgtcatacatgagtaggagggttgaattggcattgtttttacgtcctgggagatgtgagcaagagcaaaagaataagtcatcgcctttctgttgcataacctcttcatccccacaaacgaaccaaaccaaacccacaccagccatatcaaaccagatcagaacaaagagccaaacagcagaagacacttgctgaaggcactagcttatgctgaagaaatgcaataatgatttatggactctctgtatctaacactttaaatgttgatttacggaggagtcagagcccagatattccaaccaagtgcagcactttagcttggctggcgttctgtggcgtttcaatgggattttcactgcatactttcccattcaagtgtgcaaagcatttcgagtctgaataatactaagcacattcaagattcattcaaagactgcagactttgtcaagtatcttcttttcttctgggattgattcaggcaattagaccataacctacatgttttcttcctcttttgtttatgttggtattctcataataaccatgacgaattatcttccaggataaaatgaatgctccaggtactggaaagtgatgacaatgatgctacattaagccacaatgccataaattcacagatgtgacagtatactgaggtgtggcaatagctgactagctaatttatgaagccgtaaggctggtaataaattctggccctataaacagtgtcaggcaaggtaggctgaaatagaatagattcaccaatacattgtgtagggcctcctgagctatccctgttagaatctcagaaaagtgatgcttttatgattgctagatctcctgtgccatttttttggggtctttaaataaatgactaagggccacagttttaattagctgcaaggccagagagtgaagcaggctaggatcacagtgagattaaatgggggagcaggagggaagagacaggggagggagtaagaggaatagagaggaggaggatgaggggagggagcaagaggaatagagaggaggaggatgaggaaatgtctcagagaaacacatcccatgtcttggagaaatatgtgcccaaggctcttctctggctctctggataccaggtgtgtgggctgtaattctagactccattgacttatgaagctgaagctctgaagtacattcagcttagtatctggactggctggagcatggggaaggaagtcggtctacaggtagagtgtgtcattgacaccatcttggagaagtcagggaagtggatggtggtaggtcacaatgactgttggcttaatgtgaggtgtctgacagactcagtggtcttcccactgaacccggctttgcatgaccctggttgaattgcatctacttcatgtttcaggtccttatccagggactaactttgacttattgagtacttgctaaattttcaggattgggttctgccctttaacgcttagttttcctagcaaccctggtgggtaagtctaattttattctcatttgatagttgatgaaacagaggcacaaagttgtcacttgagcaatgtcacactgctagtgagtggtagaggggagctagaacccacatggatgtgactaacctctgctcactctgtctcctgccccacagagggtgatgctgagaggtctgtgttgtaaaggaggcagtgctgttgctgatgctattgacagaatggctacattacctacaaaccattgcctttctctagaagaatcctattctcaaggagttagtattagccattttgttaagttctgttttaaagttgttcccccccaacctccccgccaaatgagagagcttgcctgctcttgtccacttagggaccttatagttaaggtgtcttaagatgtcaccaaccaaaccttttgcttttggggccagaaaaggtctattagagtcaatctgctccacgttactttgtgattctcactctgtgccactttatccttgtcagttgttattttaggggcatgcattgttttaccggttaatgatcctgatcttcctgttttcatttttatctttcctgaatgcacctgttcgttccgagatgatcatctgccctgtttcatgacaaggctgttttcaccactcagtgcctcttaacaggatggtcttgctccttgcttggctgtcaacttctcactggggctgcattcttccagattattctggcttagtcttgcttttccagactcttctactttctgatcctactgttgatggtctggaaggctctgctctccccattcccattgtcaagtgggcaaagttgtaaatggtactccatgacacgtgtgggcttgggcctaccccttattcattcttttaagcctcgtcctgccaggtgctgctccaggctggccttgtcctgcctgtggtctcttccttctgtcatctgttgtctgggtcggtgccactgtgggggaaaacaaaggccttccctaccttcctgcccagagacagattccatttagttcttcttcagcagtggactctaaacaaaccctttgggaaacaaagacaacagatatgaacatgacatatcaaatatcaacaatgggatggggatggtacagaaacagcaggacatctctgtaccatctaaatgaaatagaaacctttccagtgacttgagttagtacttggaatagaaatgagttcaggacttgtcctgttttatgttcagtgaatgttatatgaagagatgaaggggtgaggaagaaaggttaagcaagcagaatgcctactatatttatttatgctttaaacacatccattaagacccttgacaatgaaagcatggatataattttaaagaacattttgcatttattaaacaaaatgttctcctaaatgtcagtgatggactttagtgtgtgaagaattcccaaccttgggcaggtcatccgcctgccctttccatgtggttaagggagaggctgaacacatgggctcatttcaggatcctcctggaagtccattttggatctgttatggttggaggaagggctggaaaagaaaatgtgcctcatgcctgaggtgtgtttccccatgagcagctctttccagaaggattttttcattaaattgttaaaaattgaagtcatatttatggtgccatcaaatcttagaattggaagaaacttgatgtcatctctgtcaaaattcatgagggaataaatgacatttaccaagacacagccgcattattatgttatcccttcgtggaggtcattcagaggttgggtttggagaggcagcatatgatgtaactccctaggtctctctgctagaaattcaggcaggtaattttagaagatgtcatatccctcaatatattttcatgcatagattaattgtaggtaagagttatatcacattatttactttgggaatctccagggaatttcttgatgttctgagtagtagcattgttggaatcccttggctccaagaaaatttcagcaatcaaaactgaactgtatttaaaataaagagcaagccccatggacgaaggggcatcttagatggtttccaccatgggacttggagggcatttcctccaggcagtgcttaggataaaaatgaggtgggggagggtagacttccctccctcttagaggttgaatgttttctgagcagacttatggtcagtttctttctgcatccttgtccaatccaatccaatccagtccagtccagttcagtccagtccagtccaaaccagaagtcatttacaggccatatatcttatacctggaatagtgctaggtgttgggaaggcactgtctcggtgttcatggtcaagtataagcaacagtccatgctctaatgtccctcttatctattcttattcatgaaaacatttttttctgagtctcagttcaaaggtatgcaaaattattgagacaaaaatagctttgtgtgttaataataacccatcattcataaatcattcattcactaggtgctttgccgtacacagaggaatcccaatgatcaagacgggtatattagtccattctcatgctcctataaagaaatacccaagactgtgtaatttataaaggaaagaggtttaattgactcacagctatgcatggctggggaggcctcaggaaacttacaatcatggtggaaggggaagcaggcaccttcttcacaaggcggcaggagagaggagagtgtgtgaaggaggaactgtcaaacatataaaatcatctgatctcatgagaacttactatcatgagaacagcatgggggaactgcccccatgatctaatcacctccctttcttgacacgtggggtttacaggtccctcccttgacacgtggggattacaaattgagatgagatttgggtggggacacagaaccaaaccatgtcaataggtgtgactacagtgcctgaaccagagagaagctgttgctgactcttggcagctcctgagagctgactgtatgcatctcttctcaactctgcattcagtgacatcccattggtagcttgaagttgactgtaatggaagtgttcacaccatggaaattggcagtcagtacaaaccagggcttcctccccaaacaaatgatttttcaaaaacccttttgtcagcacaccactgccagacactctaaataataatcactctaataattgtcagctatcatttattctatgcttctacatactagatgctttacagacttcatctcaaaatctttatagctacctctgagatggtgtctactaattagaaaaaggtcacaaaactagtacatgtcagagccagaaccagaactaactctgaactgaagaaagctcatgattctaccctttttgctttactgcctcctttacttgaagactttttcaaagccccatgcttgcattttttgagatgccttcccaccttcacctaagggaatgggactcaagaaattttaggctccatgacaagtcagttcacatgacattttgttcagataaccattttattcagtgaggtaattccgcatctccccatttattttatatcatctcatgtgacattttatctattggtgaggcagcagtgagttttgagggcagcactggtattgccagtttaattctaaaggcagtttatttgctttagtaaggtgaggaattaactggacatccatggttttatggtgactttctgattcttgttgtactgaataatagtgtctctaagaatcaatttgcactggccttttcataataagattgttattattatgagatcagttgttaggaaattgcttgggatgggatttgggtatctcaggcagtgatgtaatctttgccttaataataattaaatacctaagacttctgatacttcacctctgatacacacttacacatttgtgctgagtagagccggacaatcttgggcttcccccagagggagagcctgtcccaggaatctcatccaatggccaaccagaataataccttggccttgggacaggatatttccccaaaggagggactccctgctgaggccacgctgaccatgctgtgtcttttcttcccaactcaccgatcagataaattggccttcctccccacatgtgtgtttgtcttgcctaaggagagacctggacttgagcaatcatggaccagtccagggctcaaggaagccgttcgtccccaacccagtccccttctagccactgcctgccacctttgcaggtagtttcatctgcatggtcccagggtggctgctcaaggaagccattcatccatcccagtcgccttctagccactgcctgccaactttgcaggtggtttcatctgcgtggtcccaaggatggaagaggtaggagggtgtccctaagaggaagagcagggcaggatttcccagaaacccagagtagatgtctacatacatctcctaggccacaactccctctcatggccacatcttataaggaagcctgggaatgtaatttgtacctgaagatattgtggccctgaacaacattgggattcattgtaagaacaaggggagaatgtgtattgactagacattaatgctatccaacgttctcccatactttgacatcacatttcttctatgggctcatggaaacaactgtttctcctacatataagttatatgtaggaggaaggtgctagaaaggtccctggtctttggctctgagtcaaagcgcttagcttttagctggtgcccttccattgcatatgaagcctgagggaagaatcccgtttgctgaaccttggcttcccccactgttcaacgagtggagtgggatgatctccagggttccatgcagctctagaagcccatggtgctgtatttctgaaagactttaactcagaaggtgggatgcaagggatgaggccactgaagtcctgaactgaccttgtgtcctgaggaggcttggtcagcaggacctgggcaggggccggctgaagagggggggcccagcctgtggttggtattgggggggtccccttctaggtgggagatttccttgtcttttggaagctaactgcacatggacatgaagtcccttctttacccatcgtgatgaggacgaatggagcaacttcaggccctctgtccccctcactcttacccggacagcagtctgtccactgtcagtggtgttgattggaatggatcagaggagaaagggggaaaaaactgaggcagaagcctgcttgccttcacagtgagcggcgagcaccagtctgcaggcgttacctgctgtcatttgctgatgtctgcattttggggactgagctatttgggagagggcccttatgttctcatgaaaacgatgaacaacctactgcaaacaaaggaaaagaacgtcatgatttctataaggactgcttttcacagtagttacgatgtggtcagggggcgtgctttagtgactagctctgaattaactctgatgagagtgttagaggtttcatagtctagtcacttagaagacacatgtcaactgtagactggaaaggggccgcgtgtgctaactttcgttcagaaaactatgtctgactaaagatcagtgatttctttttttaaactcacagcagtgaaactgcttggtctatttgtgattttactaaacagtcttgactaagtttatgatgtccgttcactgcttcctcagatgaacaccttcttcctatgcggtgcttaaaatgtagtttaagagtgaacattttatttaaactgataagaatcagcaaacaaatggagaagagttaggatttcaatgggccccgcctgttagtaatatacatctacagatcgttaacatggtttgcaaatatctactgcttagaaatgtcaaagaaagggccgggcatggtggcttgtgcctgtaatcccagcactttgggaggccaaggtgggtggatcacgaggtcaggagatcgagaccattctggctaacacggtgaaaccccatctctactaaaaatacaaaattagccaggcatggtggcaggcgcctgtagtcccagctacttgggaggctgaggcaggagaatcgcctgaacccaggaggcggaggttgcagtgagccgagattgcaccactgcactccagcctgcgtgacagagcgagactctgtctccaaaaaaaaaaaaaaaaaggaaatgtcaaagaaaataattctaatggttcctagttagttactgtgtttcattttttcctctgtttttcatgaagacttacaatgcttcagataaaatgcaggatagagaaaggtgagggggtatttttcaagacacatttaggatttaatatgtacagatgctcttgatataaaataaatttgttgatcacacataatttcagcctttcaaaacataaacatggcatacaggacccactataatgatggaaactggaacatgttttgaaatcaaataaaatgtcaaaattttattaatatgctttaatcaaaaagctaatcctattactttatttctaaaataagaaagaaaaaggggaaaaaaagaagaaaggtaaaattaatgtaaaccagtaacagttttagaaagctatttttgaggaaaatgtgaaggtccatttcaatgggatggtaaaggtttgtaaacattttgtgactcctcttttgtgaactggaacgcgtcacattcaggacgtcgctggatcttcaggacattctgtgtgtttttcacttggccgacatttgctgcagtcttgggaatgtcacccgcattcttcctcctatttatgagctagagcacatataactgacttgagaaaaatgatttaaaaggtctccaactaaatttagtttattttaaatcaccatgttgactcaggaaaggagcttcacatgaaccccccgctttttttcctcctgcccagcactaagtttataaaccagaaaacaaagatctgccttcacctcccttctcttttgtcatttacttttagaattccattaacaaacacctattgcctgcccactccgtgcccacccctgtcctgggtgccgaggatgcagcggggagccaaacagatgaatgtccccatcctcaggcaggagacagacagacaataagacaaatgagcaaaggcctgctgtggtggaaataaatgctaaggagagaaaaatgaggcagaggcagcaaatggagagtgttgggggttaggattttatagagtgacagtcatggaaagactgacactggagtgagggcctgtgggaggcgaagggggagccgggagctatctggggaagaacattccagacacatggaacagccagttgccttgccagttgccttctgagcttgaggagcagcagggaggtcagggcggccagatggagagaggggaggagtggagatgaggtcacagaaagaggggccacgtgatgaaggggtgctgccaggttccctaagggccgtgggtctgtgtgatgggaagcccagcattggcgggttgtgagcagcgggagtgatgtgatctgatggatgttttcgggagatcttgctggttgccttgtggacagtagtttcaaggtttgaagcagggaacatgggaagctaacataataatccagttgaggggtgacagtggcctggaccagggacgttgcagtggaggtggggaggtgggcggtgatgagggcatgcgtgttattctgcatagggtttggatgcgtggcacgaggagaagaagtgagccaagggtgaagcccttgtgttgggtctgagcccctggaagggattacctctgtgttccaccttctgccagtcctgctggtttgtggatagcagggattgcttccctccaaggcagttatggtgagagcacatgggaagtgatgagggctcttttaatctaaaacttcttttctcctctgtgtgaaacactttcttcctctttttcaatctcccctcaagcctattcttgttgtccttggccagtgcggtgaagcagttccttgcattgtgtgtaggacctcgccaaggacagagagagacacagcgtgggttggtgttgcattgcattagaggtggccaagatgcacagtccagcccatgtggtcacaggaaggaggggtattactccgtaggtttcctttctcacaccacagcacagaatgattgctcagatcaaacattcattgtctttaagcactggtacaattgcagttcaatctcccctgcttcagtctacactgagttttcattgagactttgaggaattcaagcccctcttgctaaacacacacacacacacacacacacgcgcgtgcgcgcacgtggactactagtatcaggtttactaatgaaagagctgaatgcagagaagtggatggatttgggcccagttgatctgtggaagagggagactgagtctgggctctttactttcttggatggtgaatgttgccgtttgcatagaagcccgcatggcagtgaactaacagtaaccttgaagatgtgtttcatccaccacccttgaacccattatggctcaagcttgggtattgcttttaggaatctagcattgtttcaggaaaacattttagttcttattgttttctgggaagccttactttgcacaagggcagtggaagaaaccgaagtgcatattaagtgccatccattacttgctgtgtgtttgaatagtgatcgcagcgttgctatgttaaattgcaaagaacctgtgaacctgaatctccctccatccttcccttgtggcctctcatctctcgccactctaaaggcaccagccaggtgctcagaggagcagaagccgtgttaaaaatggcttggagcatttaagtaacttttctcctttaattctatttatttgaaatatacaaaagtccagtcataataaaacgaaaaacgcctttgaccaaattcaacacacgctaatgcttggttgtattgtcttctgagtctttttgaagaaacacagcttacaaacagagtgcatgattcatttgatccttttcttgcccagtctcttcctcttccatttggtatccagaaatgggtgtgttttcttcctgttcacgtgactctgctttctctttgcctgtatacagcacagatttcacacatatgcatgtgcacctgcacacatgtgtattctataaatgtgtttataattttgcacatatggtgttattctatacatatccttttgcaagtggttttttcattcaaggttatgttgttgagattatccatatgaatacaagtagattgagttcacgtactgatttttgtggtggtttagttctttcataattttctttgattgcctcataattgtttttatttttttaagtttaagtctttttttttgagatacctttgtttttttccagtgtcgagttattgtggtgagggagcgtgttgtgtggatcttcattctttgaaatttgtggatactttctttgggatttactatgtcgtttttagaaatcttccacatgggcgtgaaaatagtatgtattttcagtttggttcaggttcccttaatgcctgctagatctagctggattgttgtgttttcagatctttgtataagtggtgcattcagcaaattttcttcccctttgccttcatccacgtttggacagatctctcttttacatcccttgttactgtctggagtagattcaagagctttccagtctcctttaatcacttaaaagtctgatctggtctaataaaatctcttacatggattgtaggttcttttaccatccccttgtccccaagaaagacactgacaatgggagatgatgggtatgttaatctgtttgactgtagtatcactgtgtagtaatcattgtgctgtgtctatgtatatccagatgagtatttcaaaacatcctgttgtatactttcaataaatatatgcaattttaaaacccatggaagatcttacgtgattctacccttcttcctccctaaaccgcctcccaagacatgggggatgggctgtgggaatctggagggtgaggtctgttccattgtttgtacccacccctttgctcccaccccactggttctggtgcccctgtatgtggggtgcatagagggtgaaagaaattgtctgacttttctttcagacaattcagaatgtggggtcccagacacctccaaaccctcagctttaggtcctggccactaaatgtcaggcaacaggtgaagtctcacaaagcatcctctgagaatcattgtactaattgcttgtctacttaatctagctgtttaggtgagagcgacaacctctctctataatgaaggattttctatttctgtttataattctgttgatttttgcatatgtattttgaggctgtgttgtttggtgcccacagcttctggagttttatatcttcttgatgaattattgctccttattaccaagctttgctcatctttatccctaataaataattttatcctaaagtctaacttgtcctgatagtaaagtggctattccagctttctttttgttgatagctgaacttcttttttggtatgttatatcaggtatatctttttcagtaaatgtatgttaaacttttctgtttatttatggtttagatacatctctcataaacagagtataactggatttttaaaaatcatccaggctgagaatatttatgttttgacaagtgagattaatttatatattgtgtaaattacaatatatacaaaatatatttgtagttgttactgtcaacttattttgtgactttcatttttcctgactttatcaaatttatttatgctgcctatcccaatctcctgttttgggaatgttatacactctaattttagtctggttagactcttcttacgattgtctaattatccctcacctaacaaagtctgacatcaagcattgtttctacccactttccaaacgatccaaggccctctgactctgctcccctacttccagctctcaggttactgttacctagttctttagttctgctttgttttagtaatgatttctaaagttaatcattactattatctctttaattgtatcaatgcttatcttgatttatcaactcataattttcttttaaaattgaatttaagatgcatatatatccactcataattgtctttgtttacctttgtattttttttttgagacggagtctggctctgtcgcccaggctggagtgcagtggtgcagcgcaatctgggctcactgcaagctcagcctcccgggttcatgccattctcctgcctcagcctctcaggagtagctgggactacaggtgcccgccaccatgcccggctaattttttgtatttttagtagagacggggtttcaccatgttggccaggatggtctcgatcttctgacctcatgatccgactgcctcaggaggcgctgggattacaggcgtgagccaccacgcccagcctgtttacctttgtattttgaatttcatttttttcctttctgggtttaattttcttcttattgaagatatactctaatagctctttaattaagtgtctgtaagtagtaaaatcttttggtctttccctcaacatttcttcaatttatactcactcttgaatgttagttttgcctgacgtagaattttaggttgccagttattttccagcagcactttgaaggcattattttattcccttctggcgtctgttgttgctgatgagaaatcttgtatccatcaggttgtttcctttgtagataatctttattctattctctggtcacttttaatactttgtctttgtctttgatgttttatcatgatatgactagatgtggatttaattatgtttattttgctcaggactccttttttaaaaaaaaatctgaagtctcatttctttctctaaaatctggttattatttatctccaaatatatcttctgaataatttttatccctcattttcactgttcacttggacatctcatgctagcctccacactccttaacatctctgtttttccttctttctaggtagttcagtaatttctcttaccatttttgaataactaattttaagatagtctattaaatttttatttctggaatttgtcttcagttatttcagctctgtctgttattgatttatactctgctgctttttattatggtttaaatttctgtttttaaaaagtcattttaaattaactttatagatgcttttgtttgatcttttatccatgctgtttggggtgctaatcctcaatctttttgtatctactacatctactaaaatctacttattttggtttttttcttcatgtactttacaaaattttcttgtgagcttatcttcagtgaggattgttctttctttgtgaattctctataatgtaagctatgaaagtgtctctataaagtagttttatttttgcttctgccagagccctaggggtgttgaatcagttggtcatgaatcagtttatctatctatctgtctatcatctttctatcaaccatctatctatacatctaatcatctatcagtcacctatctacctacctatcttctatcaattatctatctgcctatcttctgtgtatcatctatctacctatctactatctatcagtcatcagtctacttacctacctactttcctgtcttccatcaatcatttatctatctatctacctatctacctatcttctatcaatcatttatctacctagctatcatctctctctctatcatttatcaatcatttatcatttatcatctatcaatcatctgtctaatgacctacttatcaatcatctatgtatctagtacctacctacctatctacctacctacttctatcaatcatctacctatttacctacgtacctatctcctatctatctatctattatttatctattatctatctatcatttatctatctagctattatctatctatctttctatcatctatctatcatctatctgggctgcaacacaccatacaagtaacagaaatgtggtttttatttctcacagatgactgtttttgctgcacgtagccttaggcacacagctacttttgctaggaaaggttccagtctttgctctcctgcttctcttgggtcataagctgtgtcctttgtccctgcttgggccttggaaccccacccgcagtgcttaggacttgcacttgtgacccaaatccctatgggttcctgtggattcagctagcacttgctaactgaatttctttctttgactctggaccttggggctttctgttttctttctcttgttcttggccatgtgtgtaatgtatgtaaattctttcttgggggcagggtggatgttggtggtggttagattttctctagcatttcaacgtgcttgtaattggaataaggcctgattgtctcaggcgagtctaccatgtggtgatttcagactgttctttatgaagattatttattgtacttctagtgaagtccaggaacagcatgggcattcagtgagggaaaccattttttaaaaacagtgatttttgtgaccccgtgacaatggttactgtgccactccaagatcacatttttaatataattttgtattattggtgttgaaagcatttggggtagtatagatagctttttgatggtttaaaaagtggacagaagtggggaaggagagaacaaaaatagccggtattttggtaggaaaaactgaaaattcagcaagagagtaagtctacaactgtgtggaagctggaagagaggacagatggagaaaaatatttcatctaggaaacactgaagattgttttaaggggaacgagagcagaatcttcagttagaaagaagcaagcaagaaaagaaataatacgccctataataagtacactttctggttaacatttcacactcccaacaagagcaaatggcttgtagatcttgcagcagcatgagtgaggctaatagaaattgcatggagatttttaagttgcttctattcaagctgacattatcagagaacggtccttgagtaaggctgaggccattcttcaggacctaatgtggatatgccagttgagttcgtacttagacaggacacaatcagtaatactaacaatgtacacattatactggtaatagaagagctaacatttatttgactatttttggaaaggcatactgtaatatctgtagagataaatgtttatgctttggtaggtaatttaaaaagtctattataaatctgttataataacattcacatgaaatttcttttaattaaaaagtaatgctttaaggacattaaacaattatttaaaaactcaaaattgcctcaattataccacccttgtgtaactatcttcattttacatttgtgtattattttttcttattgtaatcatactgtacataatattttacattttctcctatttattccataatagatgttttcatgtatataataaaattctcataattttgtagacattttagaatggagatttgctattaagacataaaactagtacttttttttttttttttttgacggagtctcgctctgtcgcccaggctggagtgcagtggtgcgatctcggctcactgcaagctccgcctcccgggttcacgccattctcctgcctcagcctcccgaatagctgggaaccacaggcgcccgctaccatgcccagctaatttttttttttttatttttagtagagacggggtttcaccgtgttagccaggatggtctcgaactcctgacctcatgatccgcccgcctcggccccctgaagggctgggattacaggcgtgagccaccgcgcccggccaaaactagtacattttttaaaaggaggaaatcaagatgccaatacgtgaaggcattaacaaaggaggaaaacctctattctctaatttcatcagcatttcagcaaataaaggacactttaacctccacccccaaaaatctgaggacatagtttcaaaagaatgtgacttcagttatgttaatttcgcctaagagtactgttcttccgctttcctcctatttttctaaggatgattgaaaaccttatcgggggcccttcttgatccaagagcaaagttggggattccctgccttgggtgatatctcgagagacttacttaaggggaatgctgttggtgatttttcttgcaaaatagcagactcagtgagaaggctggcatttccaatgatgggccccagattcgccacttcttttcacaggtggaagtccttcatgcagccccagagcaaggaactgcaaagaatgactacagggtgcgcaccaccacgcctagctaatttttgtatttttagtagagacagggtttcaccatgttgaccaggatggtctcgatctcttgaccttgtgatctgcccacctcggcctcccaaaatgctgggattacaggcgtgagccaccgtgcctggccccaatctgtttgttttaatcggattttatctgaaagtcctaaaacatgttcaaatatggccactgctagagaccttgatgtctttgccattcacattttcattaacaaaggacttgctctggatgtaagctgcgtttcgggtctcttcatgtggcagaggtgtctttaggggtctaaagacaagttcttgaggagacccagctatgagctacaagtttagcaatttggaactggctccatttgatgtcattgagtattcatagtacctgggggctggacaggattttgaacattaccttgcctgtgctcctgcttgaaatctgtctgagctcaccctgcctttctggcagattttgttcttgcctggaccctggctaggttaactttctgagttgaggcatgaagctcaactttttcaatgtggtttgcccttcacttctcagaaggaaattcattcccactggaatcgtcgtttttttcttgaggactccaccagctcttggcgttctaggagtaaaaggctcatgtgtttccttcaggaaacttctagctgcttaaaggagcttaatgtgaagcatcaagccactgagacgtgttcaaagattttcttcaaaatggcttgagagggaaaaaaatcacaaagcccacaaatgaatgtattgttaagcatgacttctccagtgtggttgctctgtgctgctatttacaaaatggagcagtgttttttaatgatgagggaggattaattgctgtaaatgcaccagttgctgcatttcccttccttatcccctgccccgttaaagtccacatttatcaagtcatttgatgtttgaatatctggtgtttgtacaactgttttggtttacttatttatttatgtatttatttatttttgagacagagtcccgctctgtcacccaggctggagtgcagtggcacaatcttggctcactgcaacctctgcctcccaggttcaagggattcttctgtctcagcctccttagtagctgggactacaggcacccatcgccatgcccagctaatttttttgtatttttagtagagacggggtttcaccatgttagccaggatgatcttgatctgctgacctcgtgatccacctgccacagcctcccaaagtgctgggattacaggcgtgagccaccatgcctggctgtggtttctttattttaaaaattcctatgtttgcagtgaaagagccaaaagttaaaaactgagatgcattagagaagcaggagtttatgccacatgcaaagagcaggtaaaaagcactcaggaagacaacagaagtgactcagaagtgttctttatgaaatatgcttctttaaggattgcttgaatctgggaggtggaggttgcagtgagctgagatcacaccactgcactccagcctgggcaacagagggagacaccatctcaaaataaaaataaaaataaaaataaagtaaaatatgctcctttaaaaaagtgctggttaagctttgactacacctcatttaaaattttttaatgtcaataaatttattttaagttgcttctaggagaaaactgttactattttaaagttactatgtaggagaaaactgttatcctctctacttaaatcaagatagtgactggaaatgctggcacatggaaataggagggtgagtgcttggagtgtaacactcatgggtgcctgtcaaaggaatgagaaactcggggagtcaagtaatctaagaattcaaacagggaaaattctccttatacaggaacaatatttagttgtgattccaatcttcaccttgtatctcccctgtttctctggctagcctttggcagtgaaacctcaaaataaatatttattcatttatctctctatttttctatttctctgtatgattttttttttcttagtgagcatgtctatgacaataatatggtgttggattgcttcaaagttaactcaccacattgcctttgccaccaaagagatctgccttttctttaggttttgtaaaacgttgtaggtattttgggcccacagtgtacaactgagccttcagttgggattcagtggggattcctatcagtggtgttattcagacattaggtgggattcctgcctgatctggctgccgcgttgtggactctgtcatctgagttgttgggggaaggcgtcctactgaccgttccatcctgtcaatcctggaatccagtgatccccttgacatctgtcagtcccggcaataaaagctggtgaactctgtgtccactggtggaggtgataaccctgggtggtgtttcttccttgtaaacctgattgtaatgcccagagagaaaggaaatctaatagtggcagccatcaccattagactcttggagccagagatttccagggggggttagatgcatggataggttgcaatcccaggcttgcctttttcaaggagcgatagcagagttttgaaatcatctgaagtctcaagggatgtctctgtggctcttatagaagatgctctgaatgtgtgtttagtggttgtccaaaaaaaacataaagaatacaaacaaaaacctcttggcatctttaagccagaaatgtgccttaattgtttaattctacattcaactggttctgtgattccatgcttattacgatttcttacttttgcagctattggtcaaataaaacggagccccttgtccctgccctttatccatcttaagagcaaggaggtgtggtcagtgttatcaatgaggtccatgtgatgttggattctacagttctgccatgatgggagtcgccacatgggatggggtccctttactgtcccctctgggccccttcattgcactctggagggtctttctcctgtggagcaaacagggaccgggagacactaggctggagctgtcctgagtcttgtccttcaggggacgttttctgtcttacccatcccaccttgaaggaaaatgggaccccagctacagaaatctacgtagagctggacatttctcccagctactggcctgcaggcaaatacttcctgattctgaggttgtcaaaactgccttgatgcccagccattctcaaacctgggtgttttcacttaataccttcgccagccccagggtagccaaagccggggcggggttgggtggggattgcgggtaggtttggatctccttgtatctgtagactcttctgcctcttggtgtttgtctatctgatatgctcgctcttgtaaacttcctggccctgtcaccaacctcgtgccttatagatcacttcttttgcctcctcttgtttcctcagctctttcagagacccagtgggctgttgctcactcttggcctgattggttttgacactatcctatttccatgtggctttgctacaggtttacctggcagggccacccacccaacatatgagaaactgggcttctttgttttctgaatgagctgttctcagtaggttatgatgtaggtgcaactttacttcctccaaactcatgcctcaagtctgatagctccttcctgtccctgttccgagtctcctcaggcaccagactttccctgtcacttctagatacagtgaacagtctaatttccaagtattgagaggtccagggaagttgaatttttaaaagcctattgttcgtcctgtttcaagattctttgcatccggagctggtgttagcatcggaaacgcctctggggccatggccggctcccagcctcagaggcttgcacacccactcctctccttaccactgacctctgcctctggttctccagggttggagcaggaagacaggacaacaagggctattaatggggttacttggccatgcatcataatttggtgtcggattcccctctgtgaagcaaaggtctaaaagctgccccttgttcatggaatgcatgggagggtgcggaagggctcttgcagtgacattgccccacagctctccatggcagggtgacatccctgtgtgtgtctgctgatggtacccttcccctagcttcaccctggtacacctccagcctctttctgtcagggctggctcacccctgcaagtccagccacctgccatgggtccctgggtacaaggatatacccaggccctctcacctcaccatggatggaagctcagtgtgcccccccatggcctctccttcttacctgtccccaggcagcctctgcaaacttctctacctggaaggcagtcactagcccctgtgccctggtagctcagaaccctaggggaacccttggaggcagcctaaatggtttttttgaagcttccctcactggccttgaggttggtgcatctgcacatggatgtgaaatttccctgcctatgtccccctttcctttctttccctggggtggagagaggtgctgcacagcctctgaaactttctctgaaggaatgccaggtctctggtctcttctatcagtgccggtgcacaagagctaattgtgcagatgtctcccaactcctcctttggttgattgaaattgtgggaggatttatactgtgcagaaaccagaaaactctacacatccaccctgctcccctctgcgactgtgggagctgtatactcagcattgaccagtttctgacatatatacccttgaggccgggaaggcagaggggcagggacttgctgttgttatttaggtcactccttagagagttgtgcatggatgtgcgggcatccttttttagagagtgcaccgctgctgtgctctgtgtgctattctgagcctcagccgatggcaggaaatgtcccattttgcactcagttacttatgtggcatttgtgatacattagtgctgtgcctggtgtttctttcatgatattattccctgttttccaggttaggaaactaaaactctgagaaggtggacttgttcagggccaggtggatggtcactgctagcctctgtgcctgcactctgctgcctgcgcttccatgcctgtgaccctgtctgtggggttcactgagccagtctcatagtccggctgctgactccaggaatggggcatggggcccaggaatgcctcagcgattctgatgcaggtggcatcagatggttggaaatcacctctgcagcctgacagggactggagtcttggggttctgggagaaaatgggtggtttttagagggaagccctcctccttcctgtgctagagcaaggtcgggcttacagtccttgctatgtgtaaaggacgtggctggtccaagatcagggctttccttaactccatctagggagcccagtgactctggtttgctgagattgacctccacacaacctgagcacctaatgctgtcaatttctgctggattgttttgtgcttattaacgaactctcagttatttcccacataatcgactttaagtcaacggattgcaaatgttaattacatcacgtaatttctaaattatatgattttataatttctaaattatatgattttataattctgagttttattggcagttttggtaatttactctgtgcacattcaatttgcccagttggtgtgggctctgtgatgtgctgtctgggttcccttcaggaaggaaggacttattccctcagatgctgggagtatggttggaagatgcctcagctgtcagccctctttgggaagtgcctgctgatgatgacagccctgtccaagctcatgcctcgttcccaggacatcctacaaccaatgactcatcaatgcaggagtgtcagccagggtgctccagaaagatccaacaggatggatgtagatagatctttctccctctctctctttctctgtgtgcgtgtgtgtgtgtgtgtgtgtgtgtgtgtagatatatatagatatctctctatatttcaagttccttaaaataaatcttattacacccatctttatgtccatacataaatgtacacacacgtgtgtttatatgtatatagatatagagataaaatgagatatctatgtatggatgtatatgtatgtaaatatatatagacagataaaccaatttcttaaaaatacatctcattatattgatccatatttataactgtgtacatatgtgtatatacatatgtatgcatctagattcagatggatgatagatataatgagatgtattttaaggaattagtttacacaattgtagactggcaagtctgaaattgggaaggcaggccagcaatgatctttccttttctccagagtgggccacagcccggtgctgcaggaagaagaagatattaccattaaaaagaacagccaagctctcctggataaaaggaagccctgggaagttggtgtctgctcagattacctacacaagagtctcagtgctttttggggagactgccttttgttttcagaaaatgtaggtggatgtgactgagttgaaggtgggtggtgtgatgtctgagtcttcctggtgttggtccaccccatgccttaaacaccactgtggggaacctctcctgggaggtaaaccacttccagctcagcctgaaaccaaccatgttcttcagtcttctcaagaaggccatcttggctgggtgagattttcagaggttaattcagagactcgttgccaaaactttgcatttcagagatgtccaggaaactaaggaattctccagagaaactgggaggcattacaacagatattagcttgcatgtacctgtgtagttgaatttctgtcatcaggacagaaggattagttctgtcaagtaatcaagtgtcacacggtttggctcacaaaggttaatctttccactcttcctgggctttgactgtgaacaagtatcgctggatcacaaaagagagggccctgtggtggagatgactcacagaaagtgcctcctgtttgctttctctgctgttgaaccaggatgtgcctttctctacacttagcagacagtatggtcctcaggaatacacagaggctggttttgaattccgagtttgaatttgtgttcatttgcttaccctacctgtgatcttcacatgcctcagttttctgagaaatgagaacaggaataatcacctttcaagctctctcaataaatggacctagtgattaaaactatgaaaggctctgcctgcaccttgcactgctgaagaaagctgttaccacgacacagaagaagggcagtagccttgctgggttaactgggttcgtgatgagcttattttttacaaaatattaagatgttctagctattataaaaagagaccccccccccccaatcccacaccaatttttatatagagaggatctggtcctgggattgcaaaacctgttcagattccagaaggctaggccagcaaagaaaattctggtacttaattgtgcctttctcagcaaaagaaaaaaaatgctgaataaacctcataatgcacctcatgaatgctacaaattgaaaactcaatgacatttcaagcaagaaaagaaccccctagtgatatgttggttcaccaggcaggtgtgtgggaagccagatggccagcgaggttctgccctccaggaagggtttgccctccaggtgcggaccctctccccatgtcactgagaagctctttccatctctctccattcttcatcacagtctccatcttaaaggctacacactgcctctggaaagtcttgctgttctttaagggcagaacacttcagagccagcctccaccgctcccgccctgcttctgctctgaggtggccccagcaggagtaccagtcctagaccctgactgagcagagctcccgggcttccattgaccaacctcacaggccccggggttcaaggatgcacatgctcattcttggggctgaaacagaactccccatcttcactgagacccacatttcctggctttccatcctgctctcctctcttccctgcaccttctctgcttaattggccaccaggctctgacatgtcttctcatctccaccctgtctcttgcattccgaggcttccccaccttcattaccttgggctggatcgtggcagccatcctggaactggcctctctgcctctggccttccctccctgtagtctcctgcctcatgaatcttcccaacagcctctttgggaaactttgctcggcaggtgctccaaaatcttcagctattttcacaacaaggttcggacttcctagcctaaaagtctagactctccccacgtcttggccctttgagatccacacaaaccctcatcgtccaaccaatgtgcctgccatttccctcttgcctcgggctctcctgcttcttcatttttctggaacttctgcctgagagacttgtctgatttctctccagcctctctgttccaggccattgtgcaaaacccctcaactctttttttgcttggcaaatcccttctcagccatctcaggagatggccaagatggcaaaatcatttttacagtttcgacagggggcttctattaaatggtctcattgactcctcacgtaaagtagctgtgttggctccctgtacagagtcttctgcaagctgcatttgatttctgttttgcctaagttattattgttgtctggattgccttcctctctgacgtccatataagttcttcctatttttcatgatctgggttctgctattcaaggctgaaatgccctattttcctctccttcagatgattccagttcttcttactggagcagctatgtggccccttcatctgcatcacaaaacctgggtccacagccttcctctcctgcaaggcatgtgggctctttgggagtgagagacacaccttgcaacttttctgtcccatatggccccgtccacagctctgtgcatggggtgagtgctcagttcatacttgttaaaggatgctttgatgatggagtccatggaaaattctatatagatgcagtgcatacctatgaggcttcatgggttaacggggaggcatgttgtcaacctcaggtcctgagtgtcggggaagcatgtttgtggcggggttcatgatttctattttaaatatgaaggatgatttttaaatttttatttcccaattgtgtccagtacaaatgaggtgatctttgtgcaatccttgtaaaccagtcaaaactcagtggaaatggaaaagctggtttcattgctcctggtggctcagtacccatcactgaaatcccaaagtgtttttggcaaagccgatgggtatagaactattttcatgatgagttcaaggttctttgaaattccccacccttaaagagcacaaggaaaccttttcctgttggtattctctaattttttttttgtcaacaatgtgatatacgaattgggaatctgaaatattttttcttcttttttctttatgcttttaatgctgcttgatttttcttaggaaaggttctcacctctatctgcctctctatactatatctgcctcctacaagtatcaaagtgatgctgaaagaataaattttatctaaaaaatgataacttgtaataaagtctcttatatgtaatctctctttaatatgacttgccatttttgttctattatagattattttgtacttgggagttttgctttatctaaaatattgagatgctaatatgatattagctaattgccaattgggtattttatatataacctcagaagtaattatgtattttttttctgtccagtattgttcatttgcaaatataaaacagatctcattgcaaagatggttgtctatgcatttgcttctttaagatttgaccttgtaattatatcgagacaaaattcattttgaaggtcaaatttgcctctaaaacagacttcaagattgtgttctcaaagatatattgtgtttgatgaactttcttagaaatacataatgcttgtttaatctgtggcttgcttttcagttgtctgctcttgtaaaatgactaaatatttgtttttccagttgagcttaaggaaaaaatccctggtaaatgtgttttcttgaacagaaggctcagtgtaaagcaggagagaagtcatatttatagttgcttttactttcttgatgtcatccgcctttcaaatgctgtctgttttccttcagatctctcgtttttacaggggggccccaggcagaccctggttcccacactgagggacatggcgctgttttgctgctgtgtgttttgttctggtggaagctggcagccacctcaactctgagatcagctcaaatgctttacatgcaaaacggcaaggctgagaaagaactgaaagtttccttgggtccaagaacgtcttgggctttacaaactggtgcccacaggcacattaatacctgtgtttatttttctatctcctgacacacacataaaaaatgggaagacgcactggggagaaaggttgattgaatgtcatgaatgaaagaaaggttgaccctccaaagcaacatgaaatgaaaccaaaccacaataacaaccaaatgaaataagactgacaagaagtatgcggtcatggccaatacatggctcagacatgattcatggagacccttgaaattttcttccagcaaaactgcactttaaaggtttaaatgttcaacatttctctgtgacttagagtaaaaggggaccctttagggaattgtataagagtctaaggattgccttactgagttctaaagtatagcagagttagtggtgcagcagtttacataggaaaagcacacacacacacacacacacacacacacacacacagtgaagggagatgacaataagcagcccacattttgggctattaaccaggtttagaaagcaaaattgctcaagtgggagtaactgaagagcactcaagcctgccacttttccagatttggaactccgcctccctggtttctcctctcatcacagggtctcagcgcctaggagagcagctggctatgctggcttcacagctttcctctgaacactcttttcttatcaacagttccaggcttcttggtctctctttggcttctggagcccatgtgtgctagagctggctcctcccaactcgctagagccggcaatgatgcgttagagcacatcttttcccaactctgcattcagggactcccctgggttccttgcagttgcccatgatggaaatattgactccatagaaatgaccaagtgcttcaaatcaggagttttcctgtgagagcctgttgttagccatctggcagcacaccccttctgagacagtggggtcccaccttcctgccagaactgaccccaccattgtgctgtgaaacatggcatttcctctacctcttccccagacagtaacgtccttaagtgccctggctctagaatctctatctcctctactccactggctccctttatcctgtctataaacatacctgcttttctcatccttcaaacagactgagcaaataagataaaccttcttttcattggtttgtaaatgccttgagggcagggctgagtcttgtgcactagtgcatccctagctactagtaatttctgaagtacagtaagtgcccagcaaatgttgggtgggtgaagccagttagtgcttttcatttttgttttcattgtttttttggttttgtttgtttgttggttggtttgttttgaggagtctcactctgtcccccaggctggagtgcagtggtgcaatctcagcttgctgcaacctctgcctcctggattcaagtgattctcttgcctcagccttctgagtagctgggattgcaggtgtccaccaccatgcccggctaatttttgtatttttagtagagataaggtttcaccatgttggccaggctggtcttgaactcctgacttaaagtgctgggattacatgcatgagccactgcaccctgtggcattagtgcttttctttgaactgccactccctccctaactttgttgctcaacttcttctatgagtagcctacattgccctttgcatatcctccctgtttttaactactgagccatttggcttaatgctgtcaggctcctacaacatttttagaggacagcaagaggttttaagttgccaaatccaggacctgttctcaatgcgtatggttggttgaatgactttctcctggacatgaatctctctgcagttgcgacactgaactttccatcttactgaatgtccttccttggcttccatgacttagatctttcctagtttcctccttatgctctgactgctcctccttgtgttcttggctgttttccttttccttctcagtctgaaaatatttcagacactgccttcaatcctcttctgcctccctaactcccacttagactcttttgcccctttcacccctggactttccaataaagaaaaaagaggaaggattgcagaatttctgtttttaaaaagctctccagctgattgtcatgctcaaccaagctacactctggcattaaggatcaagcaaggcaatgggggagttggcatttgtgatttttttctttacaactctgtctctctcactaggctctgaactcattggcaaagcccaaccctagttagtgtttagctcagtgcttggcacatggagggaactcagtgcgtatggatggatggatagatggatggatgaatacatggatggatgggtggatggatggatgaatacatggatgatggatggatgaatacatggatggatagatgaatgaatacatgaatacatggatggatggatggatggatggatggatggatgaacaattgtatgaatgaatggatttgaagggcaggttgaatttagatcatggaagaagacaacattatcagtgaaatcatcccttaattatagagacaaatcattcaacatttctgagttcatactctgtgccttgtgggacatacaggtgaaagactctttccctgcagcgtgcttccttggagaacacttcccttctttcctctcctcatctatttcctccacctttcctgctctcctccccattcccacttactgaaatgctaagtgcccatcaactgctctgttgctgcatctttggtacctctcttgtgaccctcaccacattatgcctccactcagtaatttaatttaaagtataacctctcatcatagcctttgtttattgaggggaggttccatgccacctccagtacctggacactcaacatgtggatagactgagataggccacttatcatggtaatagttatttactaattcttagatacggtgttgtaagtatggagatctatgagctgagctaatttccagcagatcattttattttaaaattagaactgaagagcatactcagcgtgtctgcgtgactatggatacagatggtaaaagagctgaaagcgacttttttgaacatggctactagagtgtatgggatacttttgctgccagtaataacaataacaacaaaaatgaccccaattcaaaatggtttagttaacaaggaaaatgcatttgatgtgcctagctgccctgccatgagatgccttcagagttggtttatactcttccctaccataggtagaaacacaaggacttccctcctttcccccagatatccacagcacattggttttatcctcaggtgacctcttctcatggtcctgggatggctctcacagttccaagtgccacacagacaggactactactctatggcctttcttcatcagccaacacttttcctagaagtcctctagctcgcttccccgagtgttagactgaccagaattatatcatgtgcccttccctaaaccaatccgtggtgagaagagatggtgcccagtgataggatttacactggtgttggggctggtcatcctccgtgggtcatgtgggggcaggcagaacacccaagcaaaattatgtttccttccataagggaggaagggcagccagttacgtctgctgccattgccacctgtgtgtggctatacatggaaaaagcaggctgctctgtggctgtgttcaccataactgtggggatggacggctgctgctgctctgtccttggcattgctggtgggagtggagccttctccccaggctgctgtcacgcacgtggggtccaggctacttcttggagtgagggtagcttttctggagttttctttcttcacagtagccagttccacctatggaatattcactgctgcttacacgtggtggccagggagatctgtgcgtagagaatggttctcttgtctagtgttttggggaacaaggtggtcattcattcctgaatttaacaatgcctttgctgggcatggtagctcacccctctaatccaagcactttgggaggctgagagaggaggattgcttgaggccaggagttcgagattggcctggacaaaatagtgagatctcatgtctccaaaattttttttttaaaaattagccaggcatggtggtgcatgactctttttcctatagtctgagctagttgggtggctgaggtgggaggatcacttgagccagggagggtccaggctgcagtgagctattgacaccactgcacaccagcctggatgacagagagaatcctgtatcaaaacaaagacaaaaacagaaagcagtgctttgcatctgtccatctggaccatcagcaaccccttctcattgaacttgcaccacctctctggagtcagagcctcttactcacagttttcagatgagcaaactgaggctgagggaggttttgttggctgctagtgggtcagcataaacttggggccccaagctcaaggttctttctgcctcaccatggctgctttgacaccttaagcttacccttcaggtactcagatgtgttcagctttggccatttccagtccagatttcctgatgatctggtgccttcttctacctccccatacagaacacagaacctgactgaatactgaatcccaggggtcatgtggtttgtcccactggccaggggcagggcttggagggtggtggtggtggtggggggtgtctcttcaggtcatgtgactccttgaccttggctttctgccgttgctggaccaggggtgattgagctggggtgagcagtttgcactcttaccaatgttctcaaacgactgtatttttgagttcttgagtctggtttacataattttctgacttttttgctttgatgaggccagctcacgcggctggtagtgtgcctttctctggcaaagcttctcttcgtggacttcgtgacatctttttggatcctttgtggcttctcagctgtgttacacataatttacgttgtcaggtaaatgctctcaggataaatgaaatattaataacgccataatgctaatttaaaaatacccattgcacatatttaagagaatcctctctgggcttgactctgggctttaaatcaggcccaacaatgtctcaaccataaatcaaattatcctttcagcctagtagaggttttggcataaaaacctactatagaatagcatagtataggaaatcttagttcacgcttttaaaacttttattccctttgcagaaattggaaaccaaatactcctttaaccacttatccatgcaaaacagttaaccaagcaatagtcaatattggcttttggatttggggaacatgtttattaactcaagatttgcacagctttggccgggcgccgtggctcacgcctgtaatcccagcactttggccgaggcgggtggatcacgaggtcaggagattgagaccgtcctggctaacacgatgaaaccccgtctctactaaaatacaaaaattagccgggtgtggtggcgggcgcctgtaatcccagctactcgggaggctgaggcaggagaatggtgtgaacctgggaggcggaggttgcagtgagccaagatcgtgccactgcactccagcctgggcgacagagcgagactccgtctcaaaaaaaaaaaaaaaagatttgcacagctttgcaaagcatgatctactgcaccgtccccctcccccatccccttgaacatcaggctgccgagcagggaaggccagctccttgggcccatgtatgactggatgggaaaagaatacattacagtgaaataaatgctttaaaagcatgtttaggattataaaatgattattccttagttttctcccctgattataaagatgaatatttttggtttagaaaatttggaaaatacacaaaactataaagaaggaaataggagttcaacttttcagatgctatgtataagtgagaggatgcagtatgtgtctttctgtgcctggcttatttcatttagcataaagttctccaggtttgttcatgttgtcacaaatgacaggatttctcttctaaatgctgaatagtgttccattgtgtatgtgcaccacttttctttatgggcgtttatgttgatggacacttaggttgatgccataccttgtctgttgtgaataatgctgtaatgaatttgggagggctggtacctctttgacataccgatttcattttccattttctttggatctatctccagagtgggattgccagcaatcatgtagtattttgatttgtaatacataccaaattgagttgtagtacatttgtaaaacatatagtattttgttttgtaattgatctttgtgtttttgaggaacctccatcctgttttccataatgactgtactgatctacgttcccaccaacggtgggcaagagttccctttttccacatccccaccaacacttgtctttttgataatggccattctaacaggtgtgagatgacactcatcatgatttcgatttgcatttccttgatgattagtgatgttgagcgtaggggaactggggagatgttggtcaaaggacacaaaatttcagttagacaggaggagtaatttcaagagatctgtgacttgaacttgaatagacctatgatctattgactgtagttaataacaatgcattatattcttgaaaatcactaagagtagatttcaagtgttcgcaccacaaaaaaataagtatgtgaggtaatgcagatgttaattagcttactttagccattccaacatgtatatatatatatatatatatatatatatatatatatatatatatatatatatatatatttcaaaacataatgttgtacacggtaaatatatattacttttattagttggtttaaaaaataaataattttaaaaatattttaaaaagaggaaaataagaactcctatttcacactggaaagccaaagaccatgactgttaaccattttgataacttttctcaggtcatcctctttcctttcctgccttccctcttttatttcatccacttatttttttttctttgtgcaatattgggatgatattatgtacgtggtttagtaccctgatttttttcccccagtaatgtgttttattttctgtatcacaacaaatgcttttctgtgacatctgggcaatttgcctctatgcataggtttcgaagacttcaggtggagttggctgggggcttcctaagtagagtgggaatgtcaactggcctgtggaaccatttagaaataattctgcccattacaaatattgatttgatgcagtgcttaagatgttttctaatttaaaaatattttcaacggaaacagatgccatttacaatttctcatgttgtaaggattctactaaatatattatttggggattgaatattttacttggaaagttgtgtaagaaattcctgtatctaaaaaaaaaaaaaaaaaaaaaaaaaagaagagagagagggactggattttggagccgtgctacaggcatattgtaagaaagatttttttctttctatctttttagctagttagtgttctaagattttaaaaaatacagatcctcctagcatttacaaagtaaaagggttgtttcttttctgggactatgacaattgcttaattacagttctcgggatgttttctaaattctaaatcccactaccctgttctgagcagcagaaagtgctaacagaatgatctagggaagccattattaccaaagctgggggctataaggaaaagaaaacattttcaaaatattttctgtgcaaaagcatctgtgtgcttcagcatgccagttaggcttggccttgctttcactcccgatttttgcttcataatgctgggcttccctcagaggagaggaatgttgtcccctctttttttaaggggaaggatttaagttctttccccttttaggatattttaaaataatgtttaagaaataggttttgtcggtacatgtacagttgatccctggtattaatatttgaaaacaaaataaggtttaatattcttcaacttatattcaggttattccaggatctttggagacccgaggaaagccgtgttgaccaaaagcaagacaaatgactcacagagaaaaaagatggcagaaccaagggcaactaaaggtaaaatgaacagaacccaaataatcttatgctgcctagtcaggaccccttttaaaaaatgtggatatgtaaatattttgtatctttcctatttgattttcatggttccaaacctccacagaccatttctggattctttgctgtacttggatgaattatgttggttctacatgacacccttgacttccctgagataagatgccccattgcccagcactgcctgttcctggccctacagtgtggagattttagaattactgccttctcagttctatagtcttcacagcccctcttttctccatcactgtctactctcttctcccttttccagaggaaccagaagctaggtgtctacagactggtgcttttacgatatttccatttttctatcatactactacatttggcttacagtcattttgtggttatttcacctgaatgcaattgaaaccttctttcaaggggcacacccaggcagtgaatctttgtattcacaaaacatgccaaaaaataaaaataaaatccagttgaagaaggagagggtcagctccctctctctaaggcatgcccatgaggccagctggaatgctagggctcccctggagaagcaccgcagggatcaaggttatgggggtgctcacatgacactcatgcaggccgcagaatgtatgagtccctcccttgccagaatgaagccagggtcgatcagtggaaggaatagtagtccatggagcctgagacatgccttgaccagggtcagagttcagtgagaaatggtacaattaaaatggatgtggctcttgaggccatgccctgactgtgaggcctctaatctgcattagttaagtgactttcgtaagtccctccatagaggtgatttcctttcccagtgctgttgtaacaaactgccatgaactgggtagcttaaaacaacagaaattcatcatctcaccgttccggaggctggatgtccaagatcaaggtgtcagcccaagtggttccctctgagggctttgaggaaaatctgttccaggcctcttttgtcttttccctgtgtcttcacaccatcgtccttctatacaggtctgtctttaaatcttgtccctttttttgtaagtggatcagtcacattgggttaggtcactaatgacctcactttaatttgattgcctctgtaaaggccctacctctctatcatcacatcccgagggaccgggggttagtactccagtgcatgaactgggggagagaattgatacaattcaacccatagctataagtatttttattcatttggaaagatgagccatttcctactgaagaagtccattttcttatttttagataaatgtgggagatgcattcagtttctcatgctgtcttctgtctcccgctggtattccctgcttagctttggagtgcaggagccagggctggactgggttaaggtgactggggcacaggatttcgggcggtgctcccctttaggtactgatcctgcacttgcatgagcctgagagggagagcctccttaaatcatgggccctatgtttctccctgcctccttcttcctgccccataagggaggcctctgccccagtcaggggcctggtgtgcttggcaggaatcaggcctgtgcagttcttatggcagggtttgctggtgaaagactgatttgcctaatatctgctcatccaggacaagtgcacccagcgaccaatgctttcaaggaatggattcattcctatgaatactaaattgcttagagccattttgcctacaatgttttcacttaatgactagttatcttaaaactaaaaaatacatttctaaattaaggatgtttttagtcagttgacaaagggctcttatgaaaattagcaatttatttattgaggattatttttcctaaaaagttgcaacattttaattagccagccatggtagcacgtgcctgtaatcccagctgctcgggaggctgaggcaggagaatcagtggaacccgggaggtggaggttgcagtgagccaagattgcgccactgcgctccagcctgggcgacagagcaagactccgtctcaaaaaaaaaaaagttgcaacattttatacagtatcaaaatcgtccatttgaaatatttttactttcttaattataatgattaccacttgtttagtgttgattatgtgcctagccttgagagagttttctttctgaggcataatttagtttaatcctcacaaaagcctgatggtgtagacagaggagataatcaaacaatggttcaacttgcatactgaccagttagaatagatacaggccaactcttgcactgacacctttgtgaattgctgaacatcgtttggaggttttacaaattttttattcatgtttcccaacaccaaatacatcatgtcttcgccagtaccaaccagtcattcaacactgataccaactgggtgtccaacagttcaattcagttctgacactgactaccggaagttagcacatgggtttaagggctgagctccccaacaccgtcctcacttcagatgccagttacaagtattgggtccccaggttacctacactctgtctgacatggctacaacattgggggttcccacaaccccccttttaggtgcaacaacttgctagaactcaggaaaacgctatgctcttatgattacagtttattattaagcatatgaatgaacaaccagatgaagaggtgcacagggcaaggtctggaaggattccaagtacaggagcctctgcccttttttttttttttttttttttgtgagatggagtctcgctctgttgcccaggctggagtgcagtggcacgatctcggctcactgcaacctcctcctcccgggttcacgccattctcctgcctcagcctcctgagcagctgggactacaggcgtccaccaccacgcccggctaatcttttgtattttcagtagagatggggtttcaccgtgttaaccaggatggtctcgatctcctgacctcgtgatccaccctcctcggcctcccaaggtgctgggattacaggcgtgagccaccgcgcctggccgcctctgtccctttagcattgggttgcaccacactcttcataccaatatgctcaccagcccagaagctgtcctaaccccgtcagggtattttatggagattttgttacataggcaggattgattaaatcactggccactggggatcaactcaatttctagctcctctcctctcctgagaggttgggaaatggggctgaaggttctgagcatctaatcaagactcactctttcttgcaattagcccccatcctgaagctatctagggactcaccaacctgctgccttcttagaacaaaagatgctcccatcacttgggaaattcccagagttttaggagctccatgccagaaacgagagacaagggcaaatggagttcttattatactacagtaatattatcctcattgtgcaaatgtgtaactaaggctcttggaggataaagtgatcatttataggtttccaaggagtaagtggcagatctgatttccatccctcatctggctctgcactgtgctcatatcgagcactgcccccagcccagcgtcctgcctatgccttctaggccccattcctgccctccccagctgaacccatccccattccaggacatgccccaggtgctggggcacccagagtgcctttccaaacttgactgagcatcttttgggctgcaccagcctgtttcctggagttcatcttcttgggaagatcttgtgtgtgtttccctgggtctgaaagatgagcagggagcattgctgaatggagtgtggccatgtggatcgggatgtccacgtgactatatgcatcccctaacccgcagaacacaattgggtttgagaagagaggaggggtagggtcgaggggtctcaaacttccatctattttcttgcaccagccctgcaaatatttaggccttctcttaaccattttgcaatactgcctccataattacaaaatgcttattttcccttctaccttgggtaccagtccatcttttttatgtggttagagcttacgtaattcaaatcaagtttgtttctatttagtaagacattggcattttgaaaacaaaaacaaagaagtgacacaagtagaattctgttattgttaaggccttttttgtttctttaagatacccaataataaaatatagctgggtcatgaaacacaaaatcatatggaagtatataccttagcaaatgagtttattgcaagaaacaagtattaaagaaatgattttcaatcaacatagagtgaagttctgcaagggttcaaaggcaggtaaaatagaaaataaaaaggttcctacagtgacatgaaactatcaccaactactaaaaatttttagtatggttttagtttgtttggttaccaactactacatatttgagaaatgaccattaggaacacaaaagtaaattagaagtactctttaaaaaatccataaaatacctctgaaatggtaaaaaagaacaggcactcaaatggctgcaaaaagagtcagagagggccaggtgtggtggctcacgcctgtaatcccagcactttgggaggccaacgtgggtggatcacgaggtcaggagatcgagaccatctggccgacacggtgaaaccccgtctctactaaaaatacaaaaaattagccgggcgtggtggctcacgcctgtaatcccagtgctttgggaggccgaggcgggtggatcaagaggtcaggagatcgataccatcctggctaacacggtgaaatcccgtctctactaaaaatacaaaaaattagccaggcgtggtggtgggcggctgtagtcccagctacttgggaggctgaggcaggagaatggtgtgaacccgggaggcagaggttgcagtgagccgagatcgtaccactgcactccagcctgggcaacagagagagactccgtctcaaaaaaaaaaaaagagtcagagatccgtgtgggttgaggaggcaggggagggtggttgagcttttattctcctggtctttaggtccgttgggttttcgctgagctggtgtggagggtggcagtgccatcacgctgcgtgctgagtgaatccctttggtgtgtgatcactctggtggtggcggtgtgagaagctcatacgcccttggtctctaatgtggcagagctgggagaaacttaggttccctgcttcatgcctttcaccctctttcctccagtcctcatgcttcttgttcatcaaggctccttggtggcaccctcttgtctctgcatgaatcagctctctctttcctctaggtatatccacacgcctcactgggcacctccactaactgcctgctctcaggactgaccgcttcatatctgtatgaaacagatctgtttcccatctcgatccctcaaggatcaggactgtgttgcatctggaatctctatctattcccttccctgtcattttatacttgatgcaacctgagtactcaaaacttccccataagaaacaagagactcaaacagttgctcatttagtttatgtcttggttggttacagaccgagtggctgctgtaacttctatgatgttgctgcggtcttggatatccaaggatgttttgatttttggaatccaggggaggctggcagggcatcatgtgaagtgagaattcagttgctcctgggaagggctctgggaatcccatggaggcttctggtggaggtttcttggttatccttcagtttccaaacccattttgagggcaggattagggtttgagatcatgtctcgtaggtgagtggaaatattatgtctctgtgttgggatgaagtggcttcctttgaaatgccctgtttgagtctccttttatcactggctagaaaaattttaacgaagatctcggtaatctgattgtacattgcaaagtgtatgtcagtaatctattgtcacaaaaatgctgtgtaacaaattccccaaatttcagtggcttcaagcagtaagcacttattcagccatgagcctgtgggttggccattctggttggacttggctagcggctggtctggttgcctccctcccatgtctggggttttggttgtctatgggatgatcaaacgtagtcttggtggggtgattggggtgggtgactctgcctcaggtacctctcatcctcccgcatgcatctggccatgttcccatgctggtggaaagttacagaaaagcaaaggggaacatgtcctgcctcctgaggcttcagctaggatctgtcatacttgtctttctgctactgcctgttggctgaagcagatcatataggccgcccaaaaataagggttgggaagtaattctacctctttaatgggaagaatcacaaagttatgtggcaaaaagcatgggtacaggaggagttgagtgttggaaccatctttgtacttatccatagtgacagtgaaacaagctatttaccctctatcttctccgtgcctctagagcacttacagggtgtttcaatgacctgtgtgtgtaataaactaccccaaatcctagcagcttagtacaacaacccatttattattggtcatgattctgtgggctgactggactcagctggaagctgcctccctgatgtcggcaggggccgtggtcatctgagagtcagttctctggactgtccaggacaactccctcccgggcctggcgttggtgctggctgccccactgggcactcggtcctctgccatgtgctgtgctgctgagggtatggggacttggtttcaggaggcaggaaggggaagctcccacttccataaaggcctgagcctgggactcctgaaaccttccctctgctgtgttctgcaggtcagaggcagccacaggtcagcctgggtttgaggggagggggacgagcttcagtccctggtgtgagcgtcagcatgtgtgtgcaggcagggaggaactgtgcggagtgaactagtccagagagaatgtccagacatacggaaatagccatgtgctccccagagcagggttgtgcagtgggacgccctccctttgtgaggatggcttgcagacgctccccttccgggctgaatgaccccaggagcagagtggtgttttcctgtggcacctgctgctcttaggataaggggagttgaggattcctatgctcccagaaaccttcagccaggccccatcctctcccagcctcttctcccacgagagcaccaggagcctggtcaccttcatctgcttcccggttcaatttcaggactgcacttcactccctctgtactttcagtaactctcatcccccagagggactttaggcctgggggtgggggtggggggaagtacatattttccaagacctagaaatttggttatagaaaaaaaatgcctaaggttcccagcatgtcatcttcttggtgagccaagctccgccaatcttgggaggcctccagggagactgaagacagatgtggagcatgcagatctggaggtagatgctcttcatgagaggcaattgggttggaatgggtgtgcctgtaccgtgagaggtcagaaaggacagatgtgaatgtggggaggactcctgtgaatgctttcacttgtcactacagtaatgcgctcagtagcaaatttgaaagacagccttcgaaaatgtctcaagttctgtaatcatattgtttatttttattttgcatttgttactgcaaagagccattgtaaaggagaaaacaaacaaaaaactacaggtgataaaaagcaagtgatggcttctaaaaatgtaaactaaaaaaggcatttttagtgccaaaaaagaactgatggcttggctgagatctgcagagcaccagagactggctggggaccaggtactggaggctggagcctggaaggaggggccccatgacgggagaggtccccctagaatccagctgcagtcagaaccataaccaagcgcccagggaggttgggcggcaggtgtcggtggtgggaaggtgaggggaagagatacccctctcctctcacccctgctctccagagggggccacgtcaaccaaccctgacaggtggccaggaggcaaggcaccctgctgagcccatctgtagaggtcagccctggggcctgtgacagcaaagggaggttggagactggctcggtggaaggggagggcacagacagtggtcagaacatgctgctttataatttgaataaaggaatatattggatgaagtatttatttctggaaaattcctggattataggcatctttaaatttaatttatttaagcggtgttttaaaatgtcccttcaaaatgtgggttgatacctgctaattaagtcaaaccaaattttttttgggctctggagtcagatagcctaatctgatttgaagtttggttctgtcgcttattaaccaggtgatcctggacaaatcagtaacctttatgagtcttgacgtccacagctggacaatgggaatgacagctctcagagtcgtggttggaatgaaatgagaaaatgtgtgtggagcccttagcgctcaaggaactggcgctgaagtactcaatgaatggtagctgtgctgtttactaagaacttaataacaaagctgaaaaggatgtgcagatcgcatgagttttggtgggatttcaaagtcctgttttctcagtatgatagagaagtatgccctgttttagtcccacgtcttcctttaatggatccctcattagatgctgcccacgtggaaggatgtgtggatgctgcatgtgatgtgggttagcttgagctagattcttctgtcctgtcggactagggttctcttgggctcattgtaagtgattttcccaatggaagggaagtgagttatctagtcacctcatggaccacacgtacctagaggatgcctttaggcaaacatgtttaatgtaaagctatgattcttttgccattggtgaattgtgtcctgtcctgctagaacataaaacacagaaatgcagttgtttattattatgtatgttgttccttttgtcttctagccgtcaggttctgaacagctggtagatgggctggcttactgaaggacatgattcagactgtcccggacccagcagctcatatcaaggtaagtcccgtcttggctgggaagccagctctgccttcctctgtgcctaggttttcatggatagcagcccacatatcagttaattaggggtcagtcaacacagcccaggagctaagaaaatggtttttacttttttaaatggttgaaaaatcaaaagaagcatatttcgtaacacatgtaaattgcatgaaatttacatttcagtgtccataaagaaagctttattggaacacagccccatgcattcatttctatatcatctgtggctgccttcactccataatggcacagttgagtaggttcgacaaagaccatatggcctgccagctgaaaatatttactgtctggaccttttcagaaaaaattttgctgagttaatatatgaaatcacatccaaattcttctaactcctgttataattccatctcctttatacttgcctggggttagcgagcaggagacaagtaggtgaatgattggatttccgatgttggaacgttgttttatctgggctcgccgacactcagcgctccatcacctcacacctgccctggctgctttctgacctgcacttcctgaggctctggaggtgagagggtgaggaagtgcgacttgtgccaagggaggtccctgagaggactctggccatttattttgacactacacatacatgtgggtaatagctacagggaggaaatgagatggtagttttcatatatttgacaaaaataaagactgcagaaaaaattggggcttaagctaccttatccaaacaggctgtctacacctgtgctggttagttcaactatatctatgctggccaaagtaattgactgcatggccagttcttcactttccccatactaattcattttccctaagtggtgtggttggttttactaatgtatattccttgcctaaaacattaattgaaaatgggaagggcttataattgaaagcaaagtttgtgatattgaaaagtgtacctttttgaataaaatataaaaagcctttcaaaatcccacacatacaattacacatggacgtacacacattttaaaacaatacatttggtgaggcattctggaccatgtgcagctcacatacacacacatttactttttttgaaaatggaattggaagtaataagagtttcaatgcattccttgagctttgtgggtgctccttcactttcagagattgtggtaactctagggatgtcgaggattctaaattttgcccaaggccatagaggagcagatgcttatggggacactataatttgatttctgtgtgatgttttgttgggctatgatggttgtgtttatcaaaaaaagtgcaagtaggaaatctcttgtggatgtgataaggtttcttcggaagtgctgggaacatatttgatcagtgtgtctgtgctacacaagtaaagtgggagaaagactttctttaatttttagtgtctgctgaccatgaagctgcatgatgcaaagaaaagctcatagggaagttgagacaataaatatcttctatagttcagattgtgagggacggcaactgaaattcattttattagcattccacaccacccctccaggcaaccagaaggaaatgatgaagtcagcaagaaagtattacaggttttaaaaagctaattcataaaggtgaaacaatcccatacaaacctgaaaacaccatctttgaaaatgtgtgttggtagaaacgttctatatttgatttcaggaatgaactatgttttcggctctgatttatcttattatctgaaggggtgaccttcccctccacaactgtgggtatttctagtcaggtgggacgagagactgagaaaagaaataagacacagagacaaagtatagagaaacaacagtgggctcaggggaccggcgctcagcataccaaggacctgcaccggcaccggcctctgagttccctcagttttaattgattattattttcattattttagcaaaaaggaatgtagtaggagagcagggtgataataaggagaaggtcagcaaaaaacatgtgagcaaaagaatctatgtcataattaagttcaagggaaggtactatgcctggatgtgcacataggccagatgtatgtttctctccacccaaacatctcagcggagtaaagaataacaaagcagcattgctgtaaacatgtctcaccttccaccatagggcggtttttctctcatctcagaattgaacaaatgtacaattgggttttatactgagacattcagttcccaggggcagacaggagacagtggccttcctctatctcaactgcaagaggctttcctcttttactaatccacctcagcacagaccctttacgggtgtcgggctgggggacagtcaggtctttctcatcccacgaggccatatttcagactatcacatgggagaaaccttggacaataccccgctttcaagggcagaggtccctgcggctttccgcagtgcattgtgcccctggtttattgaggctagagaatggcgatgacttttaccaagtatactgcttgtaaacatgttaacaaggcacgtcctgcacagccctagatcccttacacattgattttatacaacacatgtttttgtgagctccaggttgggtcaaagtggctagggcaaagtggttggggcaaagctacaaattaacaacatctcagcaaagcaattgtttaaagtacaggtctttttcaaaatggagtctcttatgtctttcctttctacatagacacagtaacagtcagatctctctttcttttccctacaattatcatcatattggttgatcgtattggttaatgtcaatatataatatcatcatcatattggttgatgtcaatatatgaaatataattttgagaaatcataactgagagtttttaaaaaataaatttcaactcacatggcttctgtgtgtttggagagatgaactggcaataagaagtgtggttgctaatagctgatgttggctgcgaggtagaattgtgttaaagatatttatttcctttataaacctatcaaaatcccaccaattagaattcgaataattatttttgtaattcttttttctgcatatgaaattggggttcttgacaacaaagttgggaggataattttcttccactgattcattaaaatgcctgatatgggagtttttgaagtaaaatttcatgtgcgagaagtttcttctggctttgggctgaggaacgctgctatgatttctgggaaggaagttctttttttttttttttttttttgatggagtctcgctttgttgcccaggctggagtgcagtggcgcgatcttggcttgctgcaacctctgcctcctgggttcccgccattctcctgcctcagcctcctgagtagctgggactacaggcacctgccaccacgcctggctaattttttgcatttttttttttttttttagtagagacggggtttcaccgtgttagccaggatggtctcaatctcctgacctcgtgatccacctgccttggcctcccaaagtgctgggattacaggcgtgagccaccgcacctggccggaaggaagttcttataaatggcacatgaatggttccttttgatgtattaacatatatagtggaagattttgtttttggttcattgctactaaaatgtttttgttatctgagaaggacttgagttttccacagaagtggcttaacactgcaggtgtgattcccgtgaagactctgtgtcatcacagtcctgtccgtaggctgtcctggaggagaggaacattcctttcatcttagagaaattcactctgcaaaatttatgatgactcttttctgccagaacaaatggcttttatccttttatatgtttaaggagctggaaacaataaaaaaaggaggggtggttgaaaactatggaatataaaatattcttgatttaaatagtgcaagaattgtggcaattcatttacaaacaaaatgagcaggctgtttattttagctgcttctctgtcagtgataatagtgactgtcttgaagcataatttgatttccctttctttgcaggccgttccaggtaccttttttaaaaattttttatttattatttatttttatttattttttttaagacatagtcttgctctgttgcccaggctggagtgcagtggtatgattatggctcactgcagcctctgcctcccaggctcaagcgatcttcctgcctcaacctcctgagtagctgggactacaggtgtgcaccgctacacccagctaatttttattttttttgtagagacaaggtctcactatcttgcccaggctggtctcaaactctgggctcaagcaatcctcccacctcagcctcccaaaatgctgggattacaggcatgaccaagtactttttttattacagaaattatactaactaccatatcatgcacatctactcttagcatgttaggtgtgtatgaagatacaactctctgaaggggtggagctgtcacaaccaaagatgcacccagatgattatcatcagccgacaaaaaaaatagcaaatccattttcttaggatcctataaatatttttgtcattaattctatttctgataaagcatttttaaattcacatgattgcatttcctaaaaagagttctgtctctataatattttcatttactaacatttgctgaagaggactaactaattgcctttgttgttcaccagctaatcatatagaataatacacattttggagccgatggaatgaggactggactgagaggggaaccatctgtatattagttctgctccgtggtcgccagctgtgaatcccagagatgctagtcatgaaaattctctgagctttgcattcttatccagtttcatgtcgtggataagaacacattctggctcaattcaaatcctgctctgatgtttactaacttggtgattttgtacaagttccttagtttctttgtgccttggtctcattttatatgaaacggaagcatctgttttgcagggttcgtgggagattaaacgagttagtacatttagaccccactgagtactaaacaattgtgagctatcactgtgatctataaaatgagggtggcgtacccatcttaaagataaaacatcatcctgtctctgatacctatggagcaacatgagcatgttttacaaaacactgagtggagtgaaaaatacagaaaacagaacgcgctttgtagcacatgctacttacatacataaaaaagttatatactcctcaagcaacatcacagggttttccagggtacatacatacctaaccatatagatcacattggagtgggtgcttgcctgtgtggcacatgctggctagttgctttgagaagtggttggggataagggaaaaaataatcatatgcaaataaaacaagttaataacagtgatgtttttatgtggcacagtgggtcctccatgctggcaggagcatgagtttgtacaagcacttttgtattggcttggtgttacctagtaaagctgaagatgtgcctagcctgtgatccagcagtctcaccctgggtctgtattcccttgtacctgagcaccaggaggtatgtatgagcaaaaacagaacaacccaagtgtccatctacagaaaagtggatacataaacctattgtactccaccaatggagtactatacagcagtgaaaaataaactccaagtgtctatctgtagccatgtatcagtgtggatggttctcatatgtgagtagaaaaaagtcacagattacatacaatatgattccacaaataaagattaaaaagaggcaacattaaaaagcatattattcagagaaacgtaatatgtgttgaaaagaaaaataaggaaaaaaaaccacataactcagcattggaattaccttgtcagggaggggagagttttaggggaaaggcataaggggcttctgaggtcctggggctgactgttgtggactagggagtacctgcaaaggtgtttgcttcttattctttaaattgcacaaatagattatatatcctgttttgtgtgtactatttgcaacaaaaataccaaaagaagagagaggaaaaattaggtggctcatagtgaagtcagtcttgagaggaaggtactttctagttgtaaaactcattgtactttagcaaatcatcacattagagatcacttggtctgatgctgttctagctgcaaggaaaggtgggagctactgctggtcaagtgacttccttgaagctcaggctgtgcctgttccaaagctgggcacgggccgtttccaagttgagtgtgtcctcctgccttggctttgtgagtttttccaccgcacccttttgcgatgaggaatgatttggagactgcttctgacttgggctcgtttattcattcaacaaacatttagcaaaccttccatgtaccccactgggggtggggggggagggagagaagggatcaaaaagacacagcatctgccactcagggcatgggtcacctgttctcaaacacttcgggcacagcgaagctgctagagagggacaggggagctgctgctggggtctgggcaggatctcaggggggctgcctgtagtctgcaccttcacctgctccactggctcaccccctatcacccctgtgtcctgccgacagcatctatgttcagcagccgctgcttctgcctgtaagcctcctggcagaggatcttcctgggatcacaccttgctgtctcttccaggtgaagcaggcaggtgaccctcgggtgcttgatgaggctgggggttcataggtccactcacctgtagcaggcgagtacagatgcctgaagttggaccctccatcgacacgtcctctgtcctccagctcatgaagggtgtccaggctcaattcagctaagctaatcactagatactgctccgtaagattttgtgtgaggatcaggcaccaacaatggatgacaggggaaacaaagtcactgttcaggtttctagttgctgttcacatgtggggaaggactaaaaacccagcttacccaggatttgtttgtaattaggattttcaccccttggcttccttttccctttggcttttatacttttgctcatttttatgagtgtgctggggccagatgatctcagtgtgaagcttggctccacctgttactagctgcctcagtttcctcagctgtaaaatgggaatgaaatagtgcatctaccccatagaatcacgaggaataaattagctaatgagtttagagcattcaaagcggtgcctggcactcagtgagacttattatcacatcacattacgtattgtcaatataataatatgcacaccatgttaattatataacattaatatttttaaacaatatagcatattattaatctataatgttgtatactagcatactggtgcatatagcagtggaaggggagatactgttacatatagcagtggaaggggagatactgttacatatagcagtggaaggagaaaagtaagaaggggaaatcttacggaaaaaattaaattgacccagggtcagtacttcccaagaagtgaactgaagcacttctttcccacattgttccacggctgccgctctggaagtaacgctaaatatttctgaccataaaagacgctaaacttaaactctgtgtctgtttcatagacggaagagtctaaaacagtttcagaagtagcagcgttctgtgcgaggtcactgtgaagcctgagagcccagcagatgagccgagctcttttcaataacacgaagcagatgcagaaagcgcccgaatctgccttgcgaggaagggattaggcgatgtctcggggctggtgatgatttatcccatcgctatggcgaagggtggatttcacgatggagcccccactggctgacaaaagactcattgagttgtaagcatttctcacagtttgcaaatctgatttatagtaactgtgcttcacaggaaggtgaaagtttatccttttgagaatatactcaaaagagacagagttcccccgcccccaaagtctgtctactatgaagctgatgtaagtctttgatatgctgcctattttttctcaataaatcagctttgatcagtttccagcctggttagcacatcccgatgagccctgtgactttgtggccgtgtatagctgctttttcgttttttgtactttcatttttctgcaggatgatggcacaattaaaatttctacaatgagtacttttataatcagaaaaataatattgctttaaaatatcaagatatttaatatggcacaataatagagaccctgcctacagatttctttatgtgcgtggtctcgagctggactgtaccttctgtttctccttctcactgggttcctgcacccctcagggtcgccatgctgggcaccctccagggccagattccaatgcggtgctcagttcctgtagcctttggaacggtgttcagcatgtgtgcagcagggtttagtgaagtagtgaagtgttccccagacatgctgcacaatcccccccccagtctggcgattcctcgttaagattcagtgaggctgacattcagtagggggcaccaacttaatcaggaagtgtaagaggggtttggaggagattcacaatcacttcccaggagaatgggtggaagttgcgcatggttagcctagaccccctctggggcagtttccctgaggagttggttaaaatgcagattcctggtatctaaagcttcttctccagtaagtttgggttggagcccaggatgctgcagttcaagcacctgaagtgtttctgcgtatcttgctcagataattgatagttatcaacaattaacctagccttagataatcgataaatatttataaaaggaaccatgttttttgtttctttgtttcttcattgaaggctgctgtcttttgcgtggcttctgtgaatatcctagtcacacctctaagggtttagagagcattatttggccttgggtttcaaaacatcagcaagtctcttcggctccactatttggtgtcatagagcccagaagagaagtgacacttgttgcttcttccaccttataggaaattaacttaggaatcggagtcaataattttgcttagggttagcccccagtagttgagtgttttagagacatcagcaaggttggcatcactgtctctgacttagccctgtctgtgcaattgggggttgaggatcattatcctcgttgtaggactcagtgtggggccactgttgtgggggaagcaggaattggagggtacagtggttcaggacactaaattagcattttcccatggggacacccaactctttcttactaatgaataggaagaagtcctacttattatgggtttttgctggtttaatcttcaccttcttttccttctgtgtcttctttaccttctgatcgcaaaatcccatggtgtattggtatgaaagaatgatcattgataccagatcacccaattctgcccatctatacttctccaggaagtatctgagagcactattttatcacattctattgtggtttttaatctttgctgatttgatgggtgacaatggagttttatagatgttagcacttggaaacttgtgagcttgatcatctcttcatactcttcacacacttatcaacaagttacgttatctcatttgtgatatttttggatccaatttcaatctaatcattcagaattgctgggctacagcatgaactgaacagatgatgtccccgcctgcatgaagcttccattcccgtggctgagatagaatgtgctcaagggaatagttacaaatcaggtggtgctggttggtattctccagaacaaagcaggagaagcaagagactgaggaagggagaggtagaattttacacgaaaggttagggaaggtcatagggaggaggtgacattcaagctgagacccgaagggagtgggagcatgagccgtatgatcacacggggaagagtattgcagagagagggaacagcatgtgcaaaggccctttggcaggagctctcctggcactttcaagtaacggcaaggagactgggggctggcgtggagtgaggttaaagctgcaggatgtgagttggaggcatgctggtgaggctgtgttgtagacttctgttaagcaaggataagggcatttccattttatttggcacactgcgggaggagaaccattggaaggttcatagcagatgtgatctgattgaattttttaaagctttcttgaagtataatttacattggttgaagttctaaaagaaccatgttggctgttgtgtggggaacagtctagagggggaccaagagttgaaacagggaagaccaattaggaggccattgccaggcaccaggcagcgaaaggggaggtagtgagaaatgatcagactggggatctactttgaaggtggaaaagacagcatttgctgatggattagatatgcagtgtaggagagtcaaggatgactttaaagattttgtttgtaactgggtatatgatggtgccacctactctaaaagggacatctgcaagaggggacagttgcaatgagcaggaagtcaaaagtggggtttggctgtgttgagttggagatgcctgttggatatccaaattgtgatgttgagaggttgatatgagtctagaggtcatgtgagagatatatttgtgattcctaagcctaaggctatctgaggctgggtgactaggtgagatcacctagggaccaagatgcagaagagcattagggttgagctttgggcccctccaatgcatacaggttggaaagaggagggggaactacagaggagctgagaagagaagccagtggaggtaggagaagggctaagaaactgctgtctcggtgagatgaggactgaggattagccacaggctttggccacctggacatcattgtgaccttcatatgagtgatttgcatgggtggacaaaagccaccttgcagtgaatatgaacaaaaaaaaagagagagagagaagaagtgcagacagcttatatgcaaacaactcttttgacatgatttagaaggtgtagtgagtttctcagcaatttgtatacattatattttaatgatagttcccctcagctatgtaatatttgttgtgcagattgtttttgatgattattctacctattaatttttatgatgttccttttccaacaccccatgagataaacatttttctttgatcacatcaattgataattctttttatttttcccttagcttttaacttagaaaattttatctattttattcttctttttacttctgtgtatttaccagtattctgtatagcttgtttaatagatataaaagaaagtacatcttatcgtaaaacccaccgacaaagtcattcagcattcacaggagataaggcttgtggcatccaattcagtttccttcatcaggatttctgggttctgtgcaaaatgaacacagcatcactttgcagcagtttttttttttctcttagtcccctctgcagggttgataataaaaatagttgataattagcatggacacagtaattggaaaggggcataaaccaatcagaaaagattacaattgggagcaacaggtgtccctgtcacgttgtacaccactctctcccgataccttactcgcgagtgaattggatttctggctccatgcctttctggccttctgaattttgcctctctgtcctcggatccttgctatttgtctccttgccattttggggaaaaaggaggcatttactatgtaaggattatctgtgtgcctgttttatatgtttgctagattataaattacttgaagtgatcacataatcatttttgcatcctgcattatacgttatgtatgtagcacatgcttcacatatacgagttgactgaattgaataagcaatggcaacaatgaaacaagagtgattcagggactttgttgtattctggggcagaattgaacatgtcggtattcacttactctttattttctctcctttctaggtatgattgtaaccatacaaccaatttatagcagagaggacgtgctctcacggaccatgtgtctgcgctttcatagatacctacagactttattttttagagcagttttaggttcacaacagacttgagcatataccacaagtgttctcatataattcctgcccctatacatacatagcttccaccactatcaacattttcccacatgggtggctgacgtgtaacaagggctgaacctacatcaacacatcattatcacccaaagtccagagttctcattagggttatactttaatataaacaccgtatacccttggtgttatatgttctgtgggtttggacaaacaggtgatgacacggatccaccattataatatcatacagattagtttcactgcccctcaaattcactgagctgtgtctgttcatccctcccgacctcctaggccctgacaaccactgatctttttacatctccatagttttgccatttccagactgtcatatggttggaatcatacactatgtagccttttcagattttcttatctggtatagtaatgtgcatttaagcttcctcctcgtcttttcatggcttagtagctcttcttaactttttaaaccataaaactcttttaaaattaggtgaatactatatattttctcccaggaataagaacaaacacgcacacttttatatgctcatggatctattgcagtcaattcagtacctcccctcaacccacctcccacactctcggtcctgcaggagctgggataccaggtcagccagtccctgcaacctcttgaagcagttgatgaaattgaaagtgaatttttctttgcacctatcttgctagaaactgtgttgctccttgagctcagtaggatagaagttctttgaacaaagacagtttaagaggtgcattatcgatttaaatgtagttcagatcacagatactcattctgtacttttgcatgcaggaggacggcttctcaaactttaatacatccataagtcacctggggaccttgctaagagcagatcctagttcagtaggtctagggcaggccttgagattgtgcgccacaaactacccccaggtgctgctggttctgctggcctgaggaccagcctctttaaagccaggctggaaagccctgttttccaaactacaggtcatgacccatttgtctaagtgagtcaaggccagtattaacaaaaggaaatgggatggagtaaagtggaaactatcagggcacatcacatacagaaagaaaaagtattatttttgaagattttgttttagttatatatgtgcgtgtatgtatgcatgtgtatatatatataatatctacacactgagttttataataatctacattagtttgtactctggatacattctgtgtagcaagaaacaagggtagatgcactacgttggtttcgttctaaataatagtgagcttgcaggcataaaattgcacatgtgtctccgtggattttgctgctcagattctggtatccagatgttgggattttaaccaaggctgtaaatagcagagaaagtttttttattattttaaagatcaaattccaaaattctggttgtgttttacttaattgagagtacatgttacttctgagaatgtactttaaaaagtaaacaaatttaactgaagcatggctattagttagtgattctttgtagattttctggaaagtcttgtttgtttgtattaaacattaactctgctgtatgctgtaaatacactgctaagatcaatattgaaaaacgaacaataataccaattcatatggaccttcaaattagtcttataaaattttatgatatggtattatccagccaactgactttgagactgacaaaatatctaactttaaccaggtgattcttgcattctttgttttaaaacctcaagtttaaaatatctttatatttacatttaattgtcattaatcaaaaatatatgcctaaagtaacagtcaaaaacaagtcaattttttctgacttgtgttgtttgaaaaagcccccagttcaaatatttactttctgttattgtttgaaaaaaaaaaaaaaaggattgtgtagaatttacccatttcattgtgtgttacaaaagtgacctagagcctgcaggtgtgacaaggggtgttgggtcatctccttacctgtccaatttcaccttcagggcacaatgtcctgcaagaattatatataaaatagacaatgttggcaatgagcaaagacatcaggaaagaaaacagaccaagagggagaagatatttttacctgtgaatcatttaaacaatatgctgctgttcctgttcctcagtcttttatgataatggaaaactaacatatatccaataaaaggatttagaaagacctgttacttgattcctcaaacctgaaattaaaaacaaacgaacaacataacccttaggttaggtaaaacataccatgtgaagaaatgtggctctgaataagaaaaaaaagacattaaaaaaaaccccacattttatagtattaaaaagtatgtgttagaaaaccttttgattgatattaatgcatgacataaatcaactgaaggacttattattcttgcatcaattaaaagcatttagacttacctgaaaatctgaaagtagcatgttacatacaaccctaattattgtgtgccctcatgtaaacagcaacatttgatgatcagttcactccatgaggaccacaatttgggaagctttctcatttcctttgaaatggctaaatagcgtcatgggtaattggaattatattaaattttattttccagaaaatgagtcttcatgtaggggcttggaaagtcactttttgctggtattggttttaggagtattgtgttagttaggttccctgggaagcagatgttgagacggaattaggaatgttagtgttttattggagggggaagggggctgtgcctgtgaaggataaaatgaggatgaagcaagactgggcagggagagcctcagaccaggtacagatttgatagtttgaccaacccaacggggaggtctggagcagagcttgcctttggaggggccccgggttgggcagaaatgaccaggctctagtaccctgctgtgtcagtgattggctcagggctgtctgggatgaggcagggcctgaggtgtgaacagctggaggttgttcagatgcatgctagattctttcttgaagggagatcctagtgggacacctctggggctgccatagcatctgtagaagcaggaaagggatgtagctggttccttctgaagctccagcagggttatcatttgcttgacattgtcaccctccttgtccttttttgttgttgttgcaaatttcccttttgcaagactactttctgctcagaactaaatgcccttcactcacaaaatctgtataattttcatgacctaaaatggcttctgtcctgagtgcttagatggggtcatttgctgttggacagtcccactactgtcaagtgccaccatgatgggaaattgtaatgttaaagaaaagatgaggccgggtgtggtgtctcacgcctataatcccagcactttgggagaccaaggtgggtggatcacctgaggtcaggagttcgaggccagcctgaccaacatggtgaaaccccatctctactaaaaatacaaaaaaattagctgggcgtggtggcgcatgcctgtaatcccagctacttgggagactgaggcaggaaatcacttgaacccgggaggcagggggtgcagtgagccaagaccgtgccatggcactccagcctgggcaacaagagcgaaactctgtctcaagaaaaaaaaatgattattaaaaaatttgttttagattaattttattgttggatgtttcttgggcttagacctttagataaaccattttgactctatttgttatattacctgcctctactgttatttaaggttgacgttaaatttctttcagtgattttgttaaagtctgtcatcagttagttagacctgaaatctaaatgactaaatcgtgctggccattatatcaacctttgtcctctaaaaatttgggtcccagagttggtctttaattctgcctggggctccatctcaaaaaaaaaaaaaaaaaaaaaaagggaaatgggatccatggagaaggatctattattttttttaccaagtccattgctgccaagtggaaagaaccccctcagaatgggtcatcagcaggcaggtgtgttccaggctctgcaattctcccactccaacctcctgcttctgacagatttaaggatttttggaccagaaaaaaaagtactttgggaggatcctcctatggatttccttgttctgctcctgatctctctgtgccagcccatcagctaggattcatggagcaaggtctgtggcttcaatgctgggtgctcttttgctttcattgtggggtactcacagacaccctccagcctgaggcaccggttctgccctgtgcatgcaaaagagactgtgtctccatatcgccatcacttcccctctcctttcttgctattgttctctttatattcaaattatgtagttggtacttttaatgttattttacatttccttgcaccttgatgaaagacattgtgtatttctcacctttttctgtgctgattttttatctgctcacaaatattgcctttatgactccatttctcttaaatgtggcttttaagtgtttttggttcatttgtggaaatcatttactcttccctcaatttgcgctgtaactgtcacctccgtgtgttaagtaaatcggggagatttctttatttctacatttggctttccttattgatacgtgataggaaagaaagtaattcccaaggaagactatcccagtattgtaggaatgttgtggcaacattaagccccactccatcttgcatttccatacttttgccatttactattcaaagatttggagactgatggaaaactatttcttgtttgaggcacacacactaatgtttgactttggatgagaaatttttgaatgtccttggaaaagtagaatgctgacaaggaccttgagagaagggactgtgattcaccctgtcttaaagaatgaaacttaaaactattaccaatataatttgtaccaataatagtactcatcttcttattactttaatctcctattcagtttaaagtttcttgctaaccccagtgttgacctgtttcaggctgggaaatctcagtttggacagaaggtgtggttggtcccctttctccatggtacatgtccatttctcctgctgtcatctccttgcctcttctgtgcccttgaaatcaatgatgagttgagtgaggttcaccagaccaggtttggggccaccctcagcagattctgccttaatagtctggtacctcttttttagaatgaggtctctgccaaaactgtaggacccccccccaaaacttagcatcctgatttagatcaaagaaaaaaagcaaaagatgataaaattaaatataaaatgccagttgccataggatatataaaatgataaaatagttccaaatcataagtaatttttaaaaagttttgttcattagttgaagtgcagggagaacactttgtacatcttcctaatctcagctaattctgcatctttaggagcaagaagaagggttaatatgcaggtgatgctggggtgcccatcttcatagaacagatgcccccaaagtcatacccagaacattctaagagtcttttgagaaatccagggaaatcatccacagaacacatggttttccccatgtggttaggattttatctttacctttaagaggttttacatctaaattgtcactcttattctcattggttaacgttctcagagtataatgccaagacgtctaaattgttaaaaacttaaccttttaaaaaaacatacacatatattagttttttttcaagctaatatatgtttgatcattgatcctcagagattcctacaaacctcaggttggtcccagaagtccgggggatgtcttctaaaagtgggtgacacaaagacttatgacttgcagcctagagaagcactgtctgagtgaagcccaggggccaactgtgtagcttctcagctgctctatgtcctggatctttccattttattctaaaatagtatattgcaatattgaaattcaatatggaaatatttccttgtggctttaaataaacttttcaggaatgcatattagcaactaaaaatagagaaagtctcaaatttctccacttttccaaagctattctggagatttaacacttttcttagcactctgaaggatagaacccatgatatcagtggcacaaggtcacagaaacatttagaactttctcttcctgagtacacatagctttggagtagctgaatacatgtgctttgtgagttcagtggagagtcccacaaaacacggtggaggtggcagaacctggaagacccagtaactctatgtgacggctactctagtggaagcctgagttctctattgggtaaccttggatgattgggttaggctctgctgagggtgctgggcagatgtgaggggctaccccagcgttaatcagggtaggctaatagctctaactctcaaatttcagtggtctaaacaaagtttatttctcactcctgtaacagtccagtatgggggtctgggtgcggtgggtctcctcagtagctctctgatgagaggagcaagagaaccctgctttcttcccatccagcctctacctagccttccccccactctgtgtcctcagaagcctttcttttcagccagtgggtgggagaagaatggaagattgcatgtagacctgtttcctaggccaggcttccatctacctttcattgaccaggaatgagtcacatgaccacacctggctgcaaaggaggctggtaaatatagtctgtctgggtaccaaggaggaaaagggatattggaaaggcttggcccaccccttttgtatccacaaaaggctgcagaaatgtgattggctcatatgccctatctcctcctatctccagagatgtgacttcttctctccttgggtgactacaaaataataatcttcttcattttttctcccatgacaaatcttgatgtcactgtgaacaacaatctaaaaaagtaaagattatatataataattatatgtaatctcaccaacccagatacaattaacattttaatcgttatatttccagtctatttttccatgaacaatattacatataattatttttgccaaaagaggtcatagtaactgctattttttcaattttttgaaactgcccttttatcatcccaaaatattgcatttctgcaatatggcatttttttttccatgtccctagaaactgtttagtgacctatgcaatttcatcctatgtatattctatacattttaagctaaatattttttgttggcttcagattcttggctgttatatacagggctatgttgaatatcctgtaactatctttgattaaatctatgataacttccttaggttctaatcatataagtagaatttctagaacaaagaatatgcaactgtccaaaatttttacatatatttccaatttcctttctgaagacttttaccagtttaagcacataccagtatatgacattacttgtttccccaatatctgccaatatttgttattgtatttttataatttgacagtacaaatagcaagaccttgataggtcacatttatttgcatttctttgattattaactttattagaagtgtactgatgatttatactttttcatgtccttagtccatttttccatgtggacttgaatttttcttctttatttcctcaaatgtgttgccagtgtcagacatagtgcatatttcaatatagatactcaataaaaacttgttaactgaacaaagaaaattatgttaaggatgtaacatataagttacatcctttatgttaaggatgttaaaactctgtcaaatgtgtttcatatattttctccagaaattgttgaaatttttctattaaataataatattgaaaatagaaaatttttgacaatggatatattatttttttactgagaaaaaaaccaaaactattttttatagtctttcaatatatagtttcttaattttttttttttgagacagagtctccctctgtcagccaggctggagtgcagtggcatgatctcagctcactgcagcctccgtctcccgggctcaagcaattctcctgcctcagcctcctgagtagctgggattacaggcgtgtgccaccatgcctggataatttttgtactttcagtagagacgaggtttcactatgttggccaggctggtctcaaactcctgacctcaggtaatccgcccgcctcagcatcccaaagtgctgggattacaggtgtgaaccactacccctggccagatttttaacatgtcatttaatttgttaacatttttttttgtgaattctttagttcatcctgacagaggctgttctcatcctaaattatataactattcatctgtattttctttctgtgttttatggtttaatttttaattaaatctaatctatttggattttttagatgtataatgtgagatagggatttagttttttttttttcctttctaacttttattttaggttcgggggtacacgtgtacgtttgttacgtgggtaaattgcatgccatgagagtttggtgtgcagattatttcataaaccatgtaataagcatagtgcccaattggtagtttttcaatcttcacccttcgtctaccctccaccctcaagcagcccctggtgtctatcattccattctttgtgtccatgtgtgctcagtgtttagctcccacttataagtgaaaacatgtggtatttggttttccgctcctgtgttaactcccttaggataatggcctccagctccattcatgttactgcaaaggacatgatttcattctattttatggctgtgtagtattctgtaatgtttgtgtaccacatttttttctttatccagtccaccactgatggacttctagattggttctatgtctttgctattgtgaataatgctgtgaataatgcaggtgtctttacagtagaacaatttatattcctttatatacccagtgatgggattattgggttgaatggtagttctattttaagttctttgggaaatctccaaactgctttccacagtgtctgaactaatttacattcacacacgcagcatataactgttcctttttctctgcagcctcaccaacatgtgttattttttgacttttaaaattgccgttctgactggtgtgtcatgatatctcatggtggttttggtttgcttttctctagtgattagtgatgttgagcgttttttcatatgcttgttggtcacacatgtcttcttttgagaagtgtcttttcatgtttttttggcccattttttttaaagaagttgttttttgcttgttaatttgcttaagtttttttttatagattctgcatattagacctttgttggatgcataatttgcaaatattttctcctattctgtacattgtctgtatactctattgatagtttcttttgctgtgcagaagctctttagtttaattaggtcccatttgtcaatttctgtttttgttgccattgcttttggagtctgtcatgaaatctttgccagggcctatgtccagaatggtatgttctaggttttcttctaggtttttatagttgtatgatttacatttaagtctttaatccatcttgagttgatttttgtatatggtaaaatgaaagagtctagtttcaatcttctgcatatggctagctagttatccaagcactatttattgaatagggaatcctttccacattgcttgttttgtctactttgttgaagattagatgactatagatgtgtgacattacttctgggttctctaatctagtccattggtttatgtgtctgtttttgtactagttctatgctgtcttggttactgtggccttatggcatagtttgaagctaggtagtgtgatacttcagctttttggtttcctagaattgctttggctatttaggctcttctgtggttccatatgaatttccaaatagttttttctaattctgtgaaaatgtaattagtaatatgatagaaatagcattgaatctataagttgctttgggaagtatggccattttaacaatattgattcttcctatccatgggcatggaatgtttttccatttctttgtgtcatctctgatttctttgatctttgttttgtaatacttgtcatagagattttcactccccagttatctgtacccttaagtattgtattttttttgttgctattttgaatggaattgcattcttgatatggctctcagcttggacattgttgatgtttagaaatgctactgatttttgtacattgattttgtatcctaaaacgttgtgaaattgtttttcagatccaggagtttttagacagatacaatgaggttttccagacataaatcacgtcctctgtgaagagagatagtttgacttcctctcttcccatttggatgtattttgtttcttttttttttttttctcttgcttgattgctctggctaggacttccagtactatattgactaagagtggtgagagtgggcatccttagcttgtttcaattctcatggggaatgcttccagcttttcctgttcagtacagtgttgctgtgggtttgtcatagatggctgttagtattttgaggtatgttctttcaatgcctagtttgtcagtgttttaaacatgaaaggatgttgaattttattggaagtcttttctgcagctattgagatgatcatgtggtttttgtgtttagttctgtttatgggatgaatcacatttattgatctgcatatgttgagccaaccttgcatcccaggaataatgtgtagttaatcatggtggattagctttttgatgtggtactggatttggtttactggtattttgttgaggatttccaaatccctgttcatcatgaatattggcctgaagtttcttttcttattgtgtctctgccaggtttctgtatcaaaatgatactggcctcataaaatgaggttaaggaggagtctttcctcctaaatcttttgtaatagtttcagtaggattggtagtagctctttgttatacatctggtagaatttggttgtgaatctctctggtctagggctttttctggttggtagtctttatattactgatttaattttgtaattcgttattggtctgttcagcgtttcaatttcagactttaaaccaacaatgatcaaaaaagacaaagaagggcattatataatgataaagggtccaattcaacaagaagacttaactgttctagatatgtatgcacccaatgctggagcactcagattcataaatcaagttttagggacctagtgagagacttagataaccatacaataatagtgggagatttcaacatctcactgacagtattagatagatcatcaaggcagaaaactaacttaacatatttgagacctaaacttgacacttgaccaaatggacctaacagacatctccagaacactgcacccaacaacgacacaatatgcattcttttcacctacacgtggcacatacttcaaaattgactacgcacttggctataaaacaatttgcaacaaatgaaaaaaaaccctgaaatcatactagccgtactttcagaccacagcacggtaaaaataaaatcaatgctaagaatatctctcaaaatcatggaaattgaacaacctgctcctgaatgacttttgggtaaacaatgaaactaagacagaaatcaataaattatttgaaacaaatgaaaacaaagatacaccataccagaatctctgggatacagttaaagcaatgttaacaggaaagtttatagcactaaacactgatatcaaaaagttggaaagatcttaaattaacagcctaatgtcacacctggaggaactagaaaaaacaagagcaaaccaaacttactgctagcagaagaaaagaaataaccaaaatcggggctgaactgaatgaaattgagatacaaaaaaaccatgcaaaagaccaacaaaaataaaagttggttttttgaaagaataaataagattgatagacaactagctagactgataaagaaaaaagagagaagatccaaataagcataatcagaaatgacaaaggggacattaccactgaacccacagaaataaaaaaaaaacctcagagactattaaaaaacatttctgtgcacaaaaattagaaaacccagaaaaaaagggataaatttatggaaacatacaacaccccaagattgaaccaggaaagaaatagttatttttcctcaataaatgattgttctgttgctattgaataacttactttccaactgatatgaaaatgttacttttatcacctcctgaattcttttgtgtacaaaggtttgcttttaaattatctattctgtttcctcaatccattaatcgtctgtcaattcctgactgctacccttgctgatttatctgccttatgtttttttgtgtgtgtgtcacaaaccttgtgtgaacccgagtcccatttgcaatgatcccatctctggctggttgtagttatagtctctgttttctcaattatctcaaagccacctgctcatacataataggctgtcttagcttgggctgctgtaacaaagtgctatacattgagtggcatataaacaacagaaacttatttctcacagttctaaaggctggaagtctgagatcagagtgtagcagggttgggttctggtgagggctctcttcctgattcatagatgtccatcttcttgctgggtcttcacactgtgacaaaagggtgagggaatctccctggggtcccttttgtaaaggtactaatgcaattcatgagacctccatccttatgacctagtcaccttccaaaggcccctcctcctcatactgctaccttgggggtaaggatttaaacccatgaattttgggggcacacacacattgcagttgacaaacacactatgtgtctgaacacatctcatgggcctccatctattactccaggaccctcagctcctgcttggtctcagtggccaccccagcagattgactccttctgggtgtgagggcttccacagctcagggccagcctgttacctgtcccaggagggctggcccttctttcctgtgactcagcaaccaggtcaaaaggtttccggatcctcttggcatttctgtacttggatgaagcaccccaccaccgggcgtagaacctgacttttggagtggtcaccttgggagcaggtgacaacccagacatgcagggtgactctgaccaatgaggaaggggatgcaggaagaatgtaggcaactaagttcctatttttcctccaccccatgggctgctgtgaggtagaatttttccgtgtaacctatcagaggcatctgcatggccaagggaaggcaggggctcagtgactggctgtctccatgtccccagaagctagtgtagtgacaatctcactcgcttcccctcactctcaccgccccaggtttgcacctctccaatggagcaatagtatttaatttttgtgtcagtctgtgttcaaagaaatctaggttaaaaaaaacactgtgtcctagacaaggaagatattcatttctgtattactgctgttttttcttttctttgtactttctctttttttcatagaaaattaatatttgcacccaaagaagcctctgtttcaaaagactcagctcccatgactttggcatgttacatacctaagaagcgtaaatgcaaaacaaataataaaccccaacaatcaggacattgtgcattactgtatatgtgtgttttactttgccaaattgcagaaaagtagattgaacatctagattagggaagccaaagctataacacgtggatagacatctttagttgtagatttcggtgaagtaagataactagctgtttagatctctccctgtccagggtgcacagctacagctagttagtgtcaggatgtgcaatagtttggggtccttattctgaacttctctatactctaggagccttcagatgatgcctttagtatgatgatttatcaccctggatgcaggaaacatctaggaagatgtttataaaaacattatacctgtgccccaatcccggagatttcactggtcaggggtgggcttgggcatggcttttttgttttgttttgttttgttgttttgttttgttttttgagacagagtcttgctctgttgcccaggctggagtgcggtggtgcgatcttggctcactgcaagctccgcctcctgggttcacgccattctcctgcctcagcctcccaagtagctgggactacaggcgcccaccaccatgcctggctaatttttttgtatttttttagtagaggcggggtttcaccatgttagccaggatggtctcgatctcccgacctcgtgatctgcccgcctcagcctcccaaagtgctgggattacaggcgtgagccactgtgcccgtcccaaagtcatgctttgcagagtttctacaaataactgttcagtttctctttagaaatcatatgactggccaggcacggtggctcacgcctgtaatctcagcactttgggaggttaaggctggcagatcatgaggtcaggagatcgagaccatcctggctaacacggtcaaacgtggtctttactaaaaatgcaaaaaaaaaaaaaaaaaaaaaaattagccgggcgtggtggcgggtgcctctagtcccagctacttgggaggctgaggcaggagaatggcgtgaacccaggaggcagagcttgcagtgagcagagatcgcaccactgcactccagcctgggcaacagagtgagcttccgtctcaaaaaaaaaaaaaaatcatatgataatggtctctgtttaagagaggaaaactataaggatcttggaatcgttgcctacattgacttagaaagctttatttttagaacataattttaaattttgaactaattatgaactattaacttatatatgatgacacaataaaataaaagctgttttgatttcttggtggtacttggtggaaagccagtttattggggcaatatactgtcctcaccctcaagtgatcacagattgctcaggggacataagaggtggggttggggagctgcaatttttgctgtcattgaacagcacaggggtacaatttgcatcttttcaggtattcctctttgctagaccttacgggctagaagaaattaaagagaatgaaatggtagagaattttttttggagaaaaatatcatcacacatattaccaatgtagaacaattatgattataccgttttaaggatctcagatattttcctgcttagagtctatgtattttcatttaattattaaaaagtacaggattatgtaattttttttgcattttatgccttgtggttagaccctaagtattaaaaattgcctctacttaacagtggtgcagtcttaaaaattctggctatggtagcaaaggttctggtgttggaatattgttggcctattagattcagggaactattttgatggttaagagtatttctgactgggctaagggcatcattttatctttctttcatacctatatgtggttataaatgcctagttattttgtctatgaaaatcaaatcagtttctacaacataaacagcaaaacaaaaagcatccatgaatcagcaaactttgaagtggaattttagcactaataaaagcccttgcctatgatcgagtcgccctctttaatgatttgcaggtcactgttcatcttttcctttccttgctttaccattaaataaatctctcccaggtgtcccagagagactccttagaggcagcgttccctcttgtcttgtgagaataagtctaagacactcttcattttggtgagttgatggtggggtttgtaaatatccatatggtcaaacacgcattggttgaggccatgcagatcttgttgagcaacacagaatgcatcttcgtaccttcttccctctccagcccaatccccaatattttggcaagaataaatccatagctgcaacatgggaagctagatattcatgccaaatcacgacatttgagatcaacaagttagaaaaaaaatccatgacttttcatgtagcactttagggtgacctggctcagaagttatctagggcagaccaggccaatggctatgggacattccctgagacatcttttggactcttccttcttccaacaccctggctcatattcccactcaaaggaaatggcaggaagtgacctacagacaggcagactgtctgcagagagcaaaaatctcctttgaggaccacttcatacacccacccacaaacatgaaataagtcataactgattcatcctgccagccaccagggatagttggattaattgaacactgttcttaagaaatattcagctgagggaggtcaacgaggagatcaacaaccaggtacaatgggaagctcagctttggtattctgtgctgcacactccacgtttacccagaagatgtgtaattgcttctgagaagctgaggccaggagcagatacctctaacaagcgtgttctgagtgttctctatgagacctgggagctggaccaggttgtttcttagcgctacctccagctctccctcattgttcttcttttgatatagacatcgtgatttggaggaggaatgccttggcagccagagtggagcagtcgaaaactgtgtatcataaaaatgaaaatgcattctcttaggtttgtgggcgcttgtgtcaaggcctgaagaatgagctcatatcacaatattgtggaaatattgtgattgtggaaaacgtattgcatagtaagtgttgcctgtgatagtatcacatgagcatacacccgcacaagaagggtgtgctggagtgggcgtgctagagtggcactgaaggaagcacagtactatcttttcgtatggcatgttggctttgtgtttgacagtaaagggaataaaataaggtcctcataattggagcacttctgtgtgagtagaggaagataaaaagaagtaaaaaaagaagatagaaaaaagtaaaaacttcaatgggattttagggggagtttgcacttatatccagcatataggaaaggctttgcagacagtgggacaagatgtgggctctgggagatggaccagggcaatgacagtaagtgctgcatacagaggagacacctaaacagctgactgggtcttgggagtctgggtatggaaagagttaaagatgactctaggctcaagcctggaagcctaaaaggtgcagacaccatttctaggaataagaagtttcatggagaaggatggagttggacccaaaggagaagagaggagaagtctgtagatttggttcgcaatctttgactttgaagagctgagaagagatgtttagtaggaaatgagttggagttaatgagacactgtggagttggagggttttgaagaccactgggcaaggggacagtttctttgggattggatgtggtcatgtcatgaaagctttttcagtggagctcagtagaagccaagttgcaagtaattgaagagaaagcaggcaaaatgccaaggcatgttgatggtctctatcatgtttatcgttgtgtctgagaattgtagcaccgtactgactcaattaacttttgttaatacaagggaaagtgagatattgaatgttagcttaagtggagtcaagagatgttttggattatttattttagggcagaagaaatttctcttgcacagggaaaatatccgtcacagagaaagggaggagatgcaggagggagaagacagcaagctgggaaatcatggcagtgtctgtctcaggggcgcagatgcagggattaaatttggaaaggagcaattatcaaccctacgttgctaaaggatttgggagcaagggagcgtttacctctgagtcaagagtgaagggggagaatacaggtgaagctattgagaaatcccaagagtgggaggtccaggttgaaagaacttacattttatggcttcgttactctaaaaaagtatatagaaaacaaggtcaacctttgtgagtaatgtgagagtagttttggggtaagaggcagcagaaaggaaggttttcagcagctgtgtagagaattatataggaagtgaattaggagtgaatgaaaagaagttaaggagtgaatgtaaattccaaatggattttaaaaattatgagatttgtggtagagacagacagtattagccgcatgctttttctccatcagtgcttagttctttggcactggggtggagaaagaagaccaagagcgggtagaagcttcctggttagtaagaggatgagcaatttcagggaactagtcagagcacagtgagctgactgtggggaggggagaagagccctgagttgataaaggtcctgggaaaataggatgagtcaaagaaggagagagcttcatgagcatccaggaaggcttcagaaagagcaagggtgaggcagagatggaaggagagaaggctgtggttagagagaggaattttcactagagattttttttccctcatcagttcaaatccagcctgggctgtgtaccttatataatcattttcatcatgttggttggcttgattttacggtttctgtgttcattagaataagatatcctgggaaaggaaatgtaaagtcgcctctcttctgccacagtaggatcacgtttgaagagtcatgtttagttccagacatttcctttaactatgtattctctgcagatcccactggtaccacctgagaaatactgaaaagagtcactccccagctccactgctctctttctggtccaagtcaccgtgatcctgtgcgtggatcatgactctgctttcctaattgtcctcgcttctctgcaagcgagggtctgttcttcacagggagccgggatgactgctagacattgtcagtccatgtggctccagcgctgccagccttcctccagggcctgagggccctaaccacctgatcccggttacttcttcagcctcatctcctaatgctttacccttggttctttctgctctgcccacacaaacattcttggtattcctcaccccagggcctttgcacttgctgctcccgcaatccggaatgttctacccatcatttatgacttagttcctcactttctttgggtcttcatcaccttcacagtaaagccttccctgaccacactattcaatagtgttccccaggccgggcttggcagctcattgctgtagtcccagcactttcggaggtcaaggcaggcagatcacttgaggtcagaagtttgagacgaccagcctggccaacatggtgaaatcctgtctctactaaaaatataaaaattagctaggcatggtggtgcatgcctgaagtcccagctacttgggaggctgaggcaggagaactgcttgaaaccaggaggtggaggttgcagtgagctgagatcgagccactgccctccagcctgggcaacagagtgagacttcatctgaaaaaaaaaaaaaaaaagtgtttctcacacatcaccctgtcttccttcccacttttatatccccttctcacaggctattaactttactcttttatttttttctttactgtacgtctcttccaatgagaagggaactccacaagagcaggggtttttattttgcttgtttgtggctccatcctcacttcccagcccatagtggatgctcaatgatgttcactgaatgaatgaatattgaattacctggctataaaagtcatatatgcccattgtagataactgggaaagcacagaaaactatataatataaagatatgtgtatatacacatatacatagctctatgtggaaataacctctgctaaaattacagtggaattgctttttttttaaaaaaaaacacacatatacatatgtagtttatgcatcagtagggatattggtaaatagaatgagattgtgggtatatgaccaaggggataaagatttaaaatcatattatctgatggactgtttttgagagatacttaacctggagatgaccaggatttggagagcataatatacattttagatatttgaagaattatggtgtctaagatgaagtatacttattctgcataattctggactagagcagaatccacactactggggaaagatccagaaagggtagtgttggctgcatagtgagattaattctctccggtgggccacccatctgtagggctaaattttgaagaacagagcttgacatccatagaagttcaaatagaaacacaatggcctcctgcgaggtatttgctgcttgatggctgtcgtctaaagaatctatggtagaaaagacacatttaaaaaacctttaaggcagttttaaacagctaacagtaaatttgatagcaaccacaggacattgcttatatgtctgtgggtattttcccttttctataaaatatcttttctatctattacagagtagtaactcacatggagtatctatttactgtttattttgtctcttatcaccccattggtcctcacagttttaagtgtcgtattatcacggaagagagtgaaaatgcatttcgttagccatgcataagacagattagaccaacaattcattttcttttaaccaatctatttctctatttttagaaatacattactccagaaacatcaggaacacattaagctccataataactgagattttaaagccatgttttgaagaccctctaaacccaactgatataaacacatttaagcctgacatggtcatgatgtcatttgtcctgtaaacatcttttagcctttggagaaattgtagcagacatatcagcaggattcataaacaagccagtggaaaatacacacagagaagttcataatttgagtaatttgtgttgaaaaatcacaggacatcttgatggatttataactgtcgtgataaaattaacagtgcataggccaggcgcggtgactcacgcctgtaatcccagcactttgggaggctgaggcgggtggatcacgaggtcaggagttcgagaccagcctggccaacacagtgaaaccccatcatctctaccaaaaatgtaaaaaaattagctgggcatggtggcacggccaagtcaggagaatcacttgaacccaggaggcagaggttgtggtaagctgagaacacgccactgcactccagcctgggcaacagagcgagactccatctcaaaaaagaaaaacaaaaacgaaaataaacaaacaaacaaaaacagtgtagagtatttttactttgaagctattggtactttccaaatatctgctttttaaaaatttaatttaattttacgttccaggatatatgtgccggatgtgcaggtttgttacacaggtaaacatgtgccatggtggttccctgcacctatcaacccatcacctagatattaggccacacatgcattagctatttatcctgatggatattttcaggatatctgtttttaagaagaataatgtgcattcatttgaattgctgaagtttcgttaaattcactacaaattatttatcctacatatattttaagtcagttttaagtaagactgtttttgaaataaatttgaggtattttagcataaatcactcacaaaataatttttaaattctgtaaaattctatttgtttgactttattgccttaagattcctgttatgattgttttttgagataaatttagcagtacatcagtcatttaaggtttattttacacttgagcaagtggcaatgtgtggcataaaacaagccctccctattgttataaatgaagtgtaatcaagtagattataataatgcaaggtgaaatgggagacaaagcagttcttagccagtgctatccaggcaactcacctttgtactccgaatttatctggattaccaagataattgaggggatttttgctcaggtaattgtagttgggtaatctggacttctcttccaatttgatttgaatgaagcctcttaagcagaaacatatgggcatggaagagcaagcatcggaactcttaaagggcaataaaaagtatcctaaggatttataattggatggcgtcttccatccagatggattccacagcattttaaggcttgtaaaggaaggccagatagacgtaccacagtgccctttccactccaagttgtggtcaagtgtagtgaaatttgcagcacacgaattcctgcttccttcccttccaccccagtgcctccccagccacccaagcgctcaaaggcagagctaaagcaaggagctccacccagagccaaagctttcctgatggattctgctgcattgctgggttgtgctggtcctcctctggtaccttcttaatctttgctaaagatgtatgcccaccattgtcacccccaaaatgtccatatactttgagcttggggttgaccagtcagctgacaggtggcacatactttatggaggcagatggaaaaattttacattcagcagaagagcctaattcctagcaaggattggattgagaaacaaggagcattagaaagctccagaaggcggggtctcaggcctgcacatctgtcaatatatgatgagtgatcgggcctatgcctgagtgtaaccctccttgaggagggggtttcattccactggagcaagagagggaggtggatgttcttatcatctcatggcctcacaggggaatcatttgatgtcaggattttaagagatattaagtaattcacttgccaggggtttgcagtttactaataattttatttaacttttaggttataactgtcagggtgagtcagttgtgtgcaaagcataggactaggaagaggggtgatgtggagtgactgccttctgagcacgtggtttccttttggggtgacaaaaatgtttggaactagacagaggtgttggttggacaacattgttaattaaatgctactgaattgttcactttaaaactgttagtttcatgttatgtgaacttcacctcaataagaaaccaaatatgtttgaatattttttttcttttaactggcacagtggctcagcctgtaatcccagcactttgggaggccaagatgggtggatcacttgaggtcgggagtttgagaccagcctggccaacattgtgaaaccccgtatctactaaaatacaaaaattagccaggcgtggtggtgtgtgcctgtaatttcagctacttgggaggctgaggtaggagaattgattgaacctgggagttggaggttgcagtgagccaagatcgtgccactgtactccagcctgggcgacagagcaagactctgtctcaaaaaaaaaaaaaaaaaaaaatcacgtgttggagacgctgttttatacctctgtgatgagtcaaagaaggactgggaaaatgcttcaccctccaagacgccaacctggggtcagagcatgggtatacgtgctgtgctgactatgcttacggtcagtccctgagagccgctcctcgtctatgcacatataggagcatgacccattagcaaaacaaggtgggcagaggagccagacaggcaggggcttcaatggtaaggaatatgctcaaaatgacctcttaaaaaatacaacaatgatttgtaagtatctttaatctttagctttttcactttattcgtcgatttctgtcttctcatgcttaaaaataactcaaagttatatttatatgtctagaacagtgaacataggatgtgaatcatgtaattttacattttctagtaactacctacactaatttccatcatgtattttcttttaatacaatctcccaggatatatctgaagagtccagcatagccaaaatggaatctttttaatatgtaatcaatataaaaatgactaatgagatacttttttcatagaacatcttccaaatccagcatatattttgcacctacagcacatcttaatttggactactcacttttcaagtgatcagttgtcacaggggctagtggttgccatttagactgtgcagttctaggagttgtgatttttgttgcgtcctctctggtgtcaggagatgctcagtaactaaaacataggtgaagaatgataaacatcacattatgcattagtttacagcctcagcatcgttaaagtgccttcagctcacaatatggtgaatgacataaaagaaatagtattcttttccattttatgagtgagaaaactgagattctgagagctgacatctgctcatttattcctgcccaggaatggcttaactgctgctctggtttcctagttgtcttggacaggccctgggcagtctctgttcctggaggaaaagatttatgcactgtgaaagaaactcagtcattttttacagaagagaaaatgagtctcggagaagtacagtagctctcttggtggtcatgtgctagtcaaccatggagcttgaacaagaaccatgccaagagctcttttcaattccaggtaacaagcacaagcccacatgtcttctgtcccccagcctgctggccagtcatgtttggccatatagttgaaagcaaagggtatgtaatggaattacatgactccatttaaaacagagaagctgacagactagttcactgccttagccacttagccctgggacaaattctggctagataccaattctagaaacctggaatttcccctgacaatgcctctcccagtgcagctcagtcataaagcagggagtggctagatggaagcccattactccgtaggtcacttggtcactttggacacaattctatctccttgatccaagaactaagaaggagggagaaccaactagacccaggaatcttcttttttttttaatgagaagaaccatgtttgatttttatgactttttgttatagtaaaatatacataaaatttatcatcctaaccattttttagtgtacagttgagtggtattaaatacattcacattgtggtgcaaaactcaccatcatccatctccagaacttttttcattttcttacactgacactccaacccattaaacaatagctttccattctacccttctctcagcccctggaaaccatcattttactttctgtttctgtgaatttgactgccctaggtaactcacacaagtggaatcgtacagcatttgtccttttgtggatggcttatttctcttagcgtaagataaataagacaatctcttaactttccaaaggtccatctgtgttatagcatatgtcagaatttctctccttttctaaggctgaagatatcccatgatatgtgtatatcacattttgtttatccactcatctgtggatggacacttgggttgcctccaccttttggttattgtaaataatgctgctatgaacatggatgtgcaaatatcagttcaatttcctgctatcttcatgcggaattggtgaatcatatgttaattctatttttaatttttgaatcactagactgttttttatagtgactttcccattttactctcccaccaccagtgcataagatttgcaacttttccatatctccaccagcacttgtaattttctgattttttggtaatagtcatactaatggctacgaagtatttcattgtggatttgagttgcattttcccaatgattagtgatgttgagcataatttcatgtacttattggccattagtgttatctttggaaaaaattctgttcaagtcctttgcccatttttaaattgggttgtttttgttgttgttgttgagttgtaggttatatacatatatatatatatttttttttctggatattaatcccttattagataaattattttcagatattttctcttattttataggatgtcttttgactttgttgatagcttgtttgactcacaaaagtgtttaattttagtgcaggcaaatttgtctcttttatttatgttgcctgtgcttttggtgtcatattcaagacaggcttgtgaaatccagtgttatgaagttattccctaagcattttagagttttctcataagaattttagagttttagcttttattttttggtctttgttctattttgagttaatttttgtatatagtataaggtaagagcccaacttttttcttttgcatatgtatacccagttttcccaacaccagttgttgaaaagactcctttttttctcattaaatgatctttgaaccactttcaaaagttatcagaccatatatgcaatagtttatttctgaagtctctattctattccattggcctgtatatcttagaccccagaactttcaaggacacattgaattttactttcctctcacacactaaatcttgagattttgtcagccataaatttatctatttagttcattgatacgttcttttctgttttggttatgcgaagacttaacttgcaaaaagaaatttcagtgttgaaatatttttagccaaatcaatttagcattttaaagtacagcttgattagagatttgcacaattttcactttgcattttgaaatgtaaatactgatgacagacttccattgtcttgtttgctcatgcattcattcttcccttcaacatgcactgaatacccactaggtctcgggctctgtgttgggttctacacattcaaaaccatggtctgttgcctctaagtttagtggtggatacagctgtgcaaacagttgctttaacagaggatgcataaaatgctaggggatgcagaggagacgctgacgtcccagaggagggcttcacttagaagatgaggctggatctggtatggaaggatagataggagtcctcaaggtagataaagaggagaagagtattttaaacctgggatggaatgactcttcttgaaaccacagttcttttcatgtgggctgttttcccaaatggcttgttctttgtgttactactgaccagctttccagtatagagcctaggtggagatatggcttgatgactctggtgggcttccaaagcccctaagtataagtcaggtttggttggagattacctcagtgtctacctggagagtccattaatcgatttttaggggtaacttaccagcaagatatttaatctgagtctgatggaaatcatcacatgtactccatccctaggagtagagagggggctaattgctcatggtccatggcccacataacacttgccgtcagatgtaataacccaagattgggtccagaaatggttgcttaggcagggtaaaggaggaaagaggatgagatgtgaaaaaagcaccaagaagatagtgttgattaaaaaaaattgtgttttcttattggttgaaaatatgaatttaataagaagttctttctccccctgaaatcccatagcgttttatctgtattcctcttatgaaagaagcagctgtatgataatcaagcacgttaacttttaaacacaagtgaatttgtgggatcaacatggcaaaatattagaaattgcaattgaattgaaaaatctaggaagtatagcagttttcagcagtgaacatattttactttatattactgatatttatgtccttgcaaggctttaaatatagggtacttccctaattcgtctttgggtcttccaggctgcccagcacataacctaacacattgtgggttatacatgaaggaatgaacaaataagggaaaaaaataaaggtgttttgaaaatcataaaatattcacgagtgtaagatgtacagtgggtttggtaagtgataggtgctataaaatcttttattttttaatttaatctttatttttggttgtggcaaacacataaaacataaaatctgtagtcacaaccactttacagttcagtagtgttaagtatattcacattgttggtgcagcaaatctctggaacttctttaccttgcaaaacagaaacttgatgtcaatcaacactccccgtgttctgcatgctcccaccttttggcaaccattattactactttctgaacttggactactctaggtacctcacataagtagaatcatacactgtttgtctttttgtgactggtttatttcacgcagcataatgtccttaagattcatctatggtgtatgttgggggatggtgggggtgggagagccttagggaaaatagctaatacatactgggcttaatacctaggtgatgggttgataggtgcagcaaaccaccatggcacacgtttacctatgtaacacacctgcacatcctgcacatgtccctcggaactttaaaataaaacgattaaaaaaaccactttaatttaaaaaaagattcatctatattgtacaatgtgtccaaattttcttctttttaaagactgaatgacattttattgtatgccacattttgtttattcattcatctgtggatggacgattgggttgctttgaccttttggctattgtgagtaatgctgccatgaacatggctgtacaaagaactctttgagatcctgctttaaatttttttgaatatatacccagaagtagaattgctggatcatatggtaattctatttttaattttttgaggagccaccatactgttttccatagaggctgtatcatttgatattcccaccagcagtgcacaagggttctaatttcttcatatttttgccaccattgttatttttaattttttttatatttcatagtagccatcctaataggtgtgaagtgtaaaaattattttctaagactaaagaatgaagctattgagtgtcacttgcttatcttcaagcagtcaatgcttttttaaaataattcttcaaagcagactatatgttgaagtcagaagcttctgatgtgtgactttcagggactctgaaacaggtgttcatttggcaatagaaactgatgaaacattcaaaacaactttctctcccaaaccttaaaaagaaaaattgtgacattaaaaaaaatcacaaattgtttttttcttgtcagtaatgacttactggttcatgcagaggtgaatattggtaggtaaataatcccaggactgtatgctgagaatgaagctcagagcagacccttatcagagtgtctgtcttcggaaatacttgagtcaaggagctgtccagcaggagagaggggagttataaaggctttatttgcatgtatttgcaactctttgttgcagtgtaagtataagtgaagtgtttagtataagtgaagtgaagtgtgcttctgtgtatggggagggagagaagggaggagggtgagagcacttgttccttgtataagaaaaaaaatggctctatttacatcgtaactccccatgattagtgcatgaaggaaactatatattttctgaaggcaggctattttaagaggataaaaactgtgacatcatccaggagagctaaatatcagttgagcagctagtataagaggtatatgcaatgagttatgaggctctgaaactttccacgttagtttacgccctttgcggcatgatatgaagacttttgtgtagcctaagtgttggttttaatgaggtattgcaatgtacactcaaatgaaaaacacatgatataccccaggcaagagagaagcaataactgtacatatttttgaagaagactagtcataccacaggctaccattataacagaaaaaacaacaagaattttaatacagttgtctggccaaatatattaatttaaactgaatgccttttaaaaaatattatagctgtaaggcacaacgttccattggcaagcatcttcaaaaccttcattttagaggattgaaggaaaaagtgcaagcaggccttcccggcatgtacgtttggaagatccaccaaaaagtctttgatcatttatgtgaggcttctttgagtttgacacaaagaagctaaaataaaaataaatgaatttttaaaccagttgtcgtctttgtatttacataagagaatgactgagatgccttctggaattctatggtaagaacactgggttgtgcatcagaggtcagctggtgctttgctctgtctgtgtgttgacctgagttcaaataactgagacagattttcatttacctgtgacctcatttgggtgttagccctgggttctaataattcttgtgcaaataaagtaccgtatgttgtgtgttccttaatttagaaatctgaaatctcaaagtgctttacttcattttaattcaatagtgattttactgacttcctgcttcaaggaacacagaggtgaaaaagagctagtgccctcagatggcttattacaagtagatcatttttgaccaaatgtctctaaaatcggttgagaactgatacagcactgggaagcttgttgggtcaatggacataatttttattaagggatttcgttgtatttcttttgagtccacttcacgtataaatcaccgatgagaacatcagggtggcagttacttctactatccatagagatcattgaattgcaggtatgtggagttggaaggcagctgaaaatccatgtcagactttgatcagtgtcactaaagccccattctcttgaaaatattgcaaatgatggggatgatctctttttaccttgaacacatccagacctgtgattataatcagaaatcttagcttttggctgttctcattccagttccttaaagctccttctgacacaccagcctttcacatacggcaccttctttagaatcccctgccaagaatcaagtgtttccaaactagaattgctttagatgatgggataacacaaggtgtcaaggcttcttttagttttgtgaagtaactttcgtagtgacttcagaaatgattttccatcatttgaaatggaagcctacaatcacatttccccctaaccacagtcttccagctgttaactattgtgtcttgttatgtgggtgggtgggggtggggaatcggtatatattttccttgcaactcaaaagaatccagaaattagcaccctggactcacataacagtttatcttgttgaaacccccatgtgcccaattattattggttgtctgtttgctcctgtgagtaacggaatgagggtctcaccctttgttaccttggatcgtctggctgagaactgaactttcttgttcttattctctttgtgatctactattattctggaagcagccaaggaaatactgaatcttgatttatacaccaacacaatttgactttgttttgagaggcaaaatataataatatttttctttcttctgtcagttttatttttttcttgaaatgaaccaaattgtctacacaattgcctcagttgaaagaaagactctgtgaagcttttcctggcctgggttctgtgtaacgcactgcacttgggttctgtctgaatttgactcctggagctcgccaagccctgatgtgtaattggaaacatgcacactcactcacagcagcgcttgactctgcagaatgctgcggacatttttcccatctttgttcattcttattttgtccctgtgccatgattttttaaattgaattcaaatttgcagcttctaaaagaaaaccacaagaacatgatttttaatctcttgagatttgcttgccgctgttctacatataaaatagcaatttccttaatatatctaagccagatttatgaaacaattaaaaatggcatcttatttttttttaaagtcttttaccagttaaggaagagcgtgtactaccaaagcaaaacaggttttgcctctggcgagtctgagaagtaggaatggctatttacacagacccttcttcaaagtgtgaaggagggctcaaacactgtaaatggtgattttagccttcagccagattccaaacttggaaggaaagaaaagtcctcacaaaaccatgtcgcctcatgtgaagtgatgtcatcatgttggggagaggttacctagagaagatgaagcatcttacagattactttatttgtgagctgtttctgattattccaatggagggaaggtcactttgaataatgacgccttgtcattccttctgtggggaatctacactactagtcaccagatgtgctgggtcaggcacttcaggcttcctgaccataagctccacgtgttcaggtcccctttgtgtgtgtgcccttgctggaggaaggccaacctgaagcctgctctccctgcccaccaccccaattaaggaaagctgtggtttgtgatgatttatcatcaatatctgtgtctacaggcccagtcatcttctccgagtatgaaggtttggcctgactgtagttcagcagcttcccatgtagaactttattcgtccttttgagctaactattaaatactattgagccttttctgaaatgggaattttcctctttagacatcattacaaaatcctgtgactcgacgggactttgaagatcagttgctcttgcagatctttacattttcaacgttttaaagactcttaaaaggtataaaatgagtcctattgaaatcaaattcactatgtagcacaaacttgctcatcttgatagtaagtgagccttcatgtgttggaattttcaggaaatgaagatgtcgcctaatgatgtagatggtagattgagagggatttacagttattatacttgccaattctacaccgaattgaggactctcctgtgcagaattctgccagacagttttgagaccttttcttgactttcttcccctggagaaggctttctggcctctctgtaaagttcacccaatggtcttagatccaccctctgcaacttactagaaccataggaataagtaaatccctttttcaaatggaacctttcaactatttgaagagaacacaatcatgcctcccttcaaacctcattcttgctggacgcagtggctcacttctgcaatcccggcactttgggaggccgaggcgggtggatcacttgaggtcaggagtttgaggacagcctggccaacacgatgaaaccctctctctactaaaaatgcaaaaattagctgggcatggtggtgtgcgcctatagtctcagctactcaggaggcaaaggtgggagaatcacttgaatacaggaggcggaggttgcagtgagctgagttcgcaccattgcactccagctcaggcaacagagcaagactctgtctcaaaaacaaaaacaaaactaaaaaaccaaaagtcctcgtgtcttctgttccaggacaagtccccagtttcctcaattgttctttcccatggtttttgtttatttttatttttgagacggagtttcgctcttgtcacccaggctggagtgcaatggcgtgatctcggttcactgcaacttctgcctcctgggttcaagtgattctcctacctcagcctcctgagtagctggaactacaggtgcccaccaccatgcctggctaatattttgtatttttaatacagacggggtaacaccacgttggccaggctggtctcaaactcctgacctcaggtgatcggcctgcctcagcctcccaaagtgctgggattacaggcatgagccaccgcgcctggccagccatgtgtatcttaatggaaaaaataaagacacaaatcagaacattagatattttattctaatttgatactctgttgagcctcctataggtaacgtggcttctctctaagaaaataactcatcactgctccccaaggctactccttccctagcattacccatcttagtattaataataggataaccatttactcaggggtttgtttaagcccaaatgcctagcatcattctttaatcctctttccctcatagccatccaccaacaagttctgtaggctccctcttcaaaatagatcccagtgtccagttctccacctcacttcctccaccaccagcaccttaattcacatcactagctcattctcctggagactgaagtcacccctccctcatctccctgcctctcctcttggcttcctatagactgttctccacacagaagtcagagtgttttcctcaaagtacagatcagatgagatttatgccctgctaaacaccacctcatacttccctcggcaatgtggataaaatccaagctcctgttcatgttgccaaggcccttcaagatctcacctgcctccagcaccactggctcactctgctgtggccacactggcttcttggtggttctagaatattccttattcatttctacctcagggcccgtgtgctccctgctcctgtaatataatttaaaaggttgacaatgacatcctcatttaatttctacctgaatcattgctgtgaattttatattggaaatgcagacatagtatctttttaaaaaattaatagaccattctattattaatgctaatattgtggttctctcaatgaagcttaaaaaactggctaaatcttgccagaaaggatatttaaatattaattataccaaattttaataaatagttatgtttacaaaagtttgctatgggccgggcgcggtggctcacgcctgtaatcccagcactttgggaggccgaggcgggtggatcatgaggtcaggagatcgagaccatcctggctaacaaggtgaaaccccgtctctactaaaaatacaaaaaaattagccgggcgtagtggcgggtgcctgtagtcccagctacttgggaggctgaggcaggagaatggcgtgaacccgggaggcggagcttgcagtgagccgagatcccgccactgcactccagcctgggcgacagagcgagactccgtctcaaaaaaaaaaaaaaaaaaaaaaaaaaaaaaaagtttgctatggcttcctaatgtataatactaaacaacctaatatgggttgaatcgtgtcagtaattgtgaagttctaatccaggttcaagtgattctcctgagtagctggaactacaggtgcccaccaccatgcctggctaatgttttgtatttagctggtccctcaaaatgtgaccttatttggaaatagggttattgcagatgtagtagggtgggcccctaatccagtgcttggtgtccttatgagaagaggaaatttggagacagacaggtatatgaggagaaggccatgtgaacgcaaaagcagagattgggatgatgcttctataagccaaggaacaccaaagactgcagcagcccccagaagctgggggagagagagcctagaacagatcctccctcacagcctcaaaaggaaccagccctgctgacaccttgatcttggactttcgacctcagagctgtgagaaaatacatttcggtggcggaagccgcccagggtgtggcactttgttatggcacccctgggaaacgcatacaatcttatcagaccaaactcacggaacaatctgagatccacagttgtgcctaaatcattgctgttttgaagacagccacatacagtcacatgttatcattgtcacgttagggttttaaccagggtagttgttcagtaacctctggcttcaaagcttctcagggcaaggccactcatacaattttgggttgccctttgctgtttaacaggtcctgctctcctggagaattccagctttttctttggcctccgtgtaagagagttggggggtggggctccatgcctgaggatcagaggcagaaaactgcaatcaacgcctcctcttcagacccttcctggtggtcacagccctgttcatcatcagctgcggtcaaaactctggctgagaaattgatccgctcaggaatcattcagggattatttaacccgtcattcctcagcgttcactaagcattctctctgtcctcagccagcaggaagttaccaaccacagggttttaaaaacacagattcctggtccacctcagagattctgattccacaggtccaggacgtagcacatacgtttccatttccaagcccccagctgcagctgaggctgctggtctgagaccacacttggaatagcgctggccttcaaggactagaacacattcttgccgcactccatgtcgaatcttcttctcactgtttcagtctaatattatgcccttgaatttcaccaagggctagtgtgggataggccatgtttgcagtgcctgattgttttagagaggtcagagaggtcatctcagagacttcactcattatggtgctcagtatgcgtcgtggaaaattactctcagatctgaggatgcagacgtattcagtcccttcttaggaattggtgaacatcttagtagatggtgaaagttctggaagtcatcatctttctcccattacttgcagaactgggatttttcttaattgctacagcgtttcttagacagaattctcaacatagttttttcagttcttaatataatttcctccttttgctgcttgattttgtactttcgtatgttctaataataccttcataccggtgtattttattcattttattttaaacggtaacatttttattataacgttaatccaggtggacattttagtaaatagagttagtacaaagaaaattaaaaccttcctgaccctcctcactcagaaataacatctatggacattttgggggattagccttctagttaatatatgcatgtattttaattaaattatgtgcatttatatataaatctttaagtttacttgaaaattagaatgaagataattttgctaaaattaaagacatcttactcacagttttattcattgccatatgtgtttatcagttaaatcatgagtatcgttctctatcatgatgcagtccgctgtgacatagtgtagactacaatatagtcttacagtcctgctctgactcttttaggtagtttccagttgttactacttcagacaaaattatgattaatattatagcagatacatttaattgatttagtataaaattatagaaacggactacttaggggagagagggagaggtgcaaattagagtttacatttttatcctaatccctactggatttgagttcctgtttctaaagaatttagtccactcatggattatttactccttgatgggcaatccctgtccttcagccatacccgagaaggacagagcatccctcatcctccagtggtcctcagtgcttccctcacacacagcacctgcacatgtaacagaccacgccatcacatttcttagtccctctcttcttcaaggcctcctttacaatatcatgtctttgagttcatactccccataaaggagttattcttccccaacaatagtcagaaaaagtattattattattttttttaaacggattcttaatggaccactgttaatcgtattgccttaaagaaaaacaagcttaatgttttgttcagagctctcattggcccatttggctttcagtccgtctctgcatttccacagacccacatctccaccgaaggtgtggttggtagaaggactggcaaagactttgcgacttgggcttgctttcttcctcttttctgcacattgcagtaacttggcaggagatgtctagaggttggtgctcccacagatatgcaggtgcctctcctcccccataaaaagctgacgtggttgaagtcacgtaacagcatttaggaggtaacgtgagcaggatctcgcaggaaggttgggtgggggatgaggtagagaaatgactcacaagcaactctgtgtcttggctcggtaactgagagagtggaagaagtgttggagggaaagcactgaggctcaggagagctttgcgcgtgcttctggtcatgtgctctgagagcatctggaagagatgtctggcaggcttttggatgtacaggtccgaatccagaagagggttaaagcttgagtgactgtggaaggcatcgtctgttagaggcaggaaagagcatgggcattaacatggcctttcatggagaacatgggcagggatacagaacccgagagagggtgaatgccaaaaagaggtggcaggaggggcgcggggaagatgtgaggggtgtcagctacaccacgtgtgatcttcacaccacaccagtagggaggggcttgagaatcctgttaggttgactctgctcatttccttggattatctgaaataaatttctcttttagttttaaaaattaattttcttgtctctttctgtagtcacaaatgatcttaattctgcatctacccctactctttccaatagttgcttgatgtggaagcagcacccgcttctaagatggactctcaatttgcgactgttggtctctttgtttggaattaacatgagctcttgtgttttgcccacttttgtgtttgctttaggaagtatttcaaacagagaaggctggagaattctctttcaagagcatttcagaagttatttgctcaccaatgctcaggatgaactgggtgatctctgcttacaggcttttaaacatttccagaataaaggacactgttactgtttctggctctaaaaatccttggatttctttctttctttctttttttaaacagttaaccactttctgtctttttcaccccagtaaagaaaatctaatatcttatcactgctcctgtctcttggagttttaaattacagaatgtttaattaccaaaggtccttttgcttattatattttaaacatgcaatgatgtttccaaaaatactctaaattgaagcagggaaagtcagcaacagctttattcaggtttcattggtgaacagctactggtttggatgtctgaggctgagtaatttcagtgcagatagataatttagctttatgatgattctgttgactaatagtccgaaaagatcagaaaagagtcacatataggaagatgttgactttttccacagtgagccatggttgcataacgattcctagtccagtggtcaacaagttgctgccactttgtgacagatttgaatttattctttgtttatagaaattcaagccagaaaggctcatagtgttggcagctgattaaagcaatttaagtttgatttttgacactgtaattaaatgtgagctcaagtcaaatagtgcattccataccccttccaggtgggcagggctctggagctggcagtgtgtcactgtctagcttgggtttggtctcagggattccaaagaaagctttgatttgtaaatgggtgggttgaagggtgccttccaaaatatatcttttagaggtatgaactaacaaaataaatgcaagaaaattggattaattttaataattctgctgctttgattccaaatccttgaacacctacaaaaacaaagtgtctcttaaatcgcagtcttgcctttggatcccggaactctctgtttctgtttatgagcaggaagagccagacatgtattctgagatggatggagacatacggaggagagtggaggcacctgagaagcccattcagggtaccgatgggccatcactgggcttttgcagccttcagaatgaattcctttcaaattatgttttcgaaaccagatccaggttctttctgttagtgattgttttcatatgaaataacattgaaatccagtagcaaattgggctagatgtagatgagaattccgtgtgggtaactggggttttacggagaattacaataatgagtggggtgaaactcagatattgaacattcatcaggggtgggagcttagagaagtagatcagggtgaccaccggcttcctggccaaagagatttttgtccaaccctggcccccgcctcttactcactgactttggataaaggattgagtctgttttttctaaatatttttcggggagatgttggtgatgaatactcattggaatcctcatttggaaaatggacttggtgttatataagatatatcagcaagaatgttactttctggattctacaaaaagttacaggaataacaaaatagatggcttatttgtgatagacaaccaactatttgatggttcatttaaaaaagtcgaaagctcaggcaggggctacttagaaaacacaggcaggatagaaacattaacccacgttatttttagtgtgccctttttgctacctaagtgtgttttttaagaatgatagggcatatttcagagagcaaacctggaagcattcaatccaatggcatttaataaaatgattttgactagaaaactggcctcacccagacacaatgcctcctttgagaaaccatttttcagagtctgagttgctcccactttgagaagtaactaccctagtccatatggaacaatgcatttcttccccaaacatattttatgtccaagagaaataatttcgtacagcttatacctactttgtttttgttattctgtctccatcatatggtatttaaaaagattgtcagagcaacgtcgttgttcagctttctactgaaaattcacatgagagtaacaactctgtctttggaactggcttgaaaaattctgaagtaaacaagaatttgctttttccttttatctaatctgaaattgatttatgagacaggacctctactgaactgtgttaaataccttggaaatattttgaaccaaactttcatactgtcataggaacagcagaaatatatttgcttgattaaaataaaatatttagatatgcttgatctactacactgtaagttgattaaaaatagttaaagtgttttaaccttgctaggaaagcagttatggcaatatccattttatgactttcaaatagcttttattgattataactttacacaatcatttgtcatattgcaaataaaagaatatggttaatatatggatttttaatttatggtatcctcttcttgcaataccaatataatcaatcttttcaaatgttagtaaatcaagatagaatcttttattagtaaatttatagatatgataagaaaaaggaacaaaaatgcatattttataaagaccattatttcagaagtaaatctttttttttacatttgagaaaaagtacaaatctcattttatatcttgtaatttaagtagccagatcttgtcaaaacttatatatgaaacagcttacttacagcatttcttaaaagcaatttatttttcctgggggcttactcataggaaggggaccacttacgaaaaattattgatgctactttaggtttagattaaagcaactctttctataatagaaaattctcaatttttgtatgatacagcttgtagttattgtatatgacatcagttataacccttcatactgagaactttagctgatgggaggaataattataaaatttaccaagagatatctgaatttcattcatatcatgtttttaatgtgcaagccataagttgcaaatttttggtgaagaatttcacaactaagagtgtctgaatctgcaaatgtacccaagacaccctttaatacttatctgatcaaacttacggtgatcttaattgctaagttaagtccattcagttagagttgcaagtagtatagttcctgtctcctcaggggagctttgtcaccattgtgtctaagttggcctgaaaatttctttagctgattactattttagtttccaaacttccacacttgaattatgtttttttgcaagcaaattcaatgaacttcacttgtaccaggttcctctctcattttattcacctggtgatgaaccgattatatttgtatggaggctatttttcccaatcaccctgaatattgttctaaatttaagctctatgcttctctctttgctttcatgagcttcttttgtcctagagtaacccccacattttttggaggtggcgtcacatagtgttttagatgtgaaataaggagttagaaagactttggtctgaggtctgtttgcttgctgtgactgtgggcaagagacgtaacttctctgtgcctgcctacctttagctataaaatgcagctaataatcgacatatctagtaaggttttgtgataactggaccagggcttggctccgtgtgtagtagccgcactttgagatgctgaatgttgcttgagaaaatgaagggaactgtgtggctggtcttactttaagttgtgtccatgaatctctgatgcacactcactgaagcccggaaatcctcctcctcgactctgtgctgtcggctggctcttctgtccctgctgggcttctaagtgatgggcaggctgaaggttcagctttaatcttggcttttatttgttatctcacttctccccactaagaaatgagatccaatcacatggcttaaaaaccatctataaactggtgattcccagtctcgaatcctgatatatccagctcccaactgatatctcaacatgtatatctatgagcacgtctgatataaagtacaaatcccgatctgctctccccaatcttgtattcttcaagtcttcttctctgtaaagtaaaaacactattttcgcagttgttaagccttaacattacacaacaaccacaaaccacagatcatctctgattgttcttttttcgtgctctctgcctccagtcaatcaccagtcctgataggtcttcctgcagaaactcctggaatgagtcacccgtcccctagaatgatgcggtagcgtcttagcttggttatcccagctttcctttgtgcatgttgacaaaccttttctgtacacaaaaccttcagaacgtgtcaaggagatcagacaatccctaattcatctttggccccaatggcttcccgccatgtttgggattaagttcaaactcctcagtaggatctggctcttgcccacctcatggacacagatgagattgttcagccctggcttgtgtctgttcctcggatgcccctgaacttgtgagttcaaaatcaaaaaggatatttgaggagctgatccttcagtctagagggctacttctctggatctttaagtagctggttcctatttgttgtgcaggttctaatttgatgccacttctcagtgaaggccatcccctccagctcctggctcttcccaagggacaagaagggtcttgggaagaactcctgatgcttcatatctaagctctgtgttccttccttgcagtgaattgatagatgactgcaaggcaaggttatcccttctcccccgtttcatctgcctccttgcaaaagtatttcacacgtgaaaagttttgacctgctaactgaggagaaaagtaaccctggaagttttttttgtttttgttgtgtgtgtgtgtatgtgtgtgtgtctgtatgtgtgtgtgtgtggtgacatggggatatcatacaaacagtattttatacaaaatgctttcagtgtccaagctgagtttcccttgtttggaagcatatcagatggcaaagggcttctcaactgcatctttctccctgcttctacatgtgtggttagggtctcagtcctaatctagttgtgcagccagatatagcatttaactgagagaataatactgcagtggacattcttgtaggtgacttctggtgcacatatacacacatctctattgtacatgtattaaatagtggaattacacagtctttgatgacagtagatgtgccgactttctttgtttacttctctaattcattctccatccttctctgctcctcttgtcctgggagtttgacttctgtcgactacatcaaatgggctcctttgtcctctatcttctgttgggttaagcaaatgagagtcaccacaaggaagcctgagagtaggaggagagagcttggggagtttttttctccagctttctctctttggtcatgggttggcagtgactttttccctccatggaaggccacagctcctattgtttatcctctcctgtgttcacagctaccggtgctgcgtgactgctacctcccttgcccttgtaggcctgagggtagtaatggcttcctgttcttgctagcctgggggacttcctcaccctttggtttttactaaattctacctttaccgttgtaaattctttcattaaattttgttcacttacctatttgaatatgctatatgcctcttattacagccctgatggataaataaggatgttttttaaactccagctgtgtgtgagagttcttattgctccacatcttcaccaacattgttagtctttgttttagacattctgatgtatctgtggtgttatttcattcaggttttaatttgtacttcctgctttactaatgaagtagaagaccttttaatgagcagttggatatcctcttttatgactgcctgtgcagtttcttccctgtttttccttgtgtgtattctgacttgtgtgtattcttattgattgatgggggttctttacatattctggatatgaatagtagattagatgtgttaaagatatcatcttccactccatgcattgccttttgattctcttaatagtgtcttttgatgaaaatttaagttcctaatttttttcttattttaatgcagttcaatttattagtctttcctttactcttagtgtttctgtgccttgtttttaaaatctttcccttcccaagtcaggaatatagttttctatattatgttccagaaacttcatagtttttgcttgtcatatttagatttatagtttatctgacatcaatttttgtgatgttatgagttacttctcaagtttctgtttctcatgtggatttctcattttccagcatcatttaccaacagtttctcccttttttaactactctgcccctttgtaaaaaaaaatcaactgccaccttcgtcaaaaatcaagtgtgtccatatatgtgtgaatctgtttctgaactttcctttcttttccattgtctgatttgtttctacctgcatgaacactattctgacctaattgctgtgcctttataaaaatgtttagtagagcaggttgtcctacctcactcttttttttaagatttgccttttaaaaatggatactataaatagatagatagatagatagatagatagatagatagatagatagatagatagatacacacacacacatagttatggggtacatgtgatagtttgttacatgcatagaatgtgtaatgatcaagtcagggttttggggtgtctgtcaccttgggtatttctcatttctatgtgtcaggaacattgcaagtcctcttttctagctgatttgaactatacaatacatttttgttaagtatagtcagctactctgctatacaacatcagaacttattccttctatctaactgtatgtttgtacccattatccaaactctcttcctctccactcccactctctgctcagcctctggtaaccatcattccactctctatctccatgacattaacatttttagctcccacataggagtgagaacatgtggtatttgtcctttgtgcttggcttattttacttgacataatgacctccggttccatccatgttgctgcaagtgacatgatttccttatttttatggccaaatagtattccattgtgtatatgtaccacattttgtttaccatttcatctgtggatggacatttaggttgatttcatgtctttgctatggtaaatagtgctgcggtaaacatgtgggtgcaagtatctttttgatatactgatttctttttcattagataaatacccagtagtgagatatctggattatattgagtcttatttttagttttttgagaaatctctactgttttctatagtggctgtactaatttacattcccactcacagtgtagaagagttcccttttctctgcattctggccagcatctgttattttttgtctttttaataattgccattctaactaaggtatgatgatatctcattgtggttttgatttgcatttccctgatgattagtgatattgagtattttttttcatatgcttgatggccattcctgtgtcttcttttgagaaatgtctattgacgttctttgcccactttgtaaaagttttctttttaattgttgagttgtttgagttttgtgtatattctggattttctcttactagatgaacagtttacaaatattttatcccattcaacaggttgtctcttcactctgctggttgttttctttcctttgctgtgcagaagtgttttagtttaatatagtctcatttgtctgttttctcttgcctgtgcttttgaggtcttagccatcaaatctttgcttagatcaatgtcctgaaatgttttctctattttcttttaatagttttataatttggggtcttaagtttaagtctttcatctaccttgagttgatttttatatatggcaagagatagaggtccagttttattctttcgcatatggatatccaattattccagcaccatttattgaagagggtgtctttttcccaatgtatgttactgatgcctttgttgaaagtcggttggctgtgaatatgtggatttatttctgggttatcaattctgttccattggtctatgcgtctgtttttatactagtatcatgctcttttggttactagagccttgtaatatattttgaagtcaggttatgtgatgctcccagttttgttgtttttgttcagggttcctttagctattcaggctcctttttgctttcatataaattttaggattgtttttttctattcttgtgaaaaatgacgttaatattttaacagggattgcattgaatctgtagatttatttgggtggtgtggtcattttaatgatattagttcttctgatccatgaccatgcagtgtcttttcatttgtttgtgtccttttccatttctttcattagtgttttgtagtttttttgtagagatttttcgcttccttggttaatttttttcctagatattttttccttatacctattgtaaatgggattttcttcttgatttctttctcagccagtgcattattgggtatataaatgctactgatttttttgtatcctgcaactttactgaattttttaattaaacctaagagttttttggtggagtctgtaggtttttctagatgtaagatcatgtcatctccaaagagggacaatttgacttcttttccagtttggatgacctttattgctttctcttgcctgattgctctggctaagacttccagtcctatattgaatagaagtgataaaaatgagaatccttgtcttgttccagttcttagaggagagactttccgcctttccccgttcagtataatgttagctgtgggttaatcatgtatggactttaatatattgaggtatgtttcttctgtacctagtttgttgagagcttttactatgaaacaatgttaagttttatcagatgccttttctgcatttattgatatgatcatatggtttttgtttttttctattgatgtgatgtatcatatttattgatttgtgtatgttgaaccatccttgcatctctgggatacatcccacttgaccatggtgcattatctttttgatgtgctgttggtttcaggctactaatattttgttgatagcttttgctgaacaaaatactagaaaacttatattcaccagaaatattggcctgtatccatgctgaactgaagtgatgttcatcaggaatatcagcctgtagttttcttttttgttgtgttcttgtctgattttgttatgagggtaatgttggcctcatagaatgaattaggaagaattctctcctctttaattttttgaaatggcttggtgaggattggtattagttcttctttctaagtttggtagaattagtagtgaaaccatctggtccttgacttttctttgttgggagattttttttcctatccaatcttattacttgttattggtctgtttaagttttcagtttctttctgattcaatcttggcaggttgtatgtgttcagaaatgtatccatttcctctaggttttccagtttgtaatagtctctgataatcttttgtatttctcactcttctttaagagcatcttgtctgtttttgactctgcatttccatacatattttagaatcactcaagtttcacaaaaactttgttgaaatattgaatgcatctgcattgaatctattgatcaatttgaagaaaattctacctttgattattaagtttttcaatccatgaatatatctatccatttattttggtcttcttttaataatattttgtagtttttggtgtagaggttctgcacgtattatgttagatttatgtccatattgtaaggtatttttaatgctaatgaaaacagtatcacttaaaaattttgatttctattgatgtttatgctgatatataaaactaaaattctatattgaccttgtatctagcaaacttttaaaactcatttattaattctaatgacttatttccaaattctcttggaaattctgtgtaaaaaaatgatgtcatctgtaaataaagttttatttactttttcccaatcctttaacattgcatttcatttccttgccttctttactaactaagactgccaattcaatttcagacaaatgcggtaatatgtggggcttctttgtcttttcccccaacttcaaatgattaaattttaaagttttgacatgaaaatgtgtggtttactgtaggtttcggtagattccttttatcaatttgtaggatttataaacttcctctttatttctaatttactaagaatttttaatatgaatgttgaatgttattaagtgcttttcttcttttgtttaaagttatataaattttctttacaatgtaaatttgattatttgattgaaacaagctttcattcttaaaataaatccagtttgttcacaatatatattattgtcgtatatactgttgggttttgttttctagaattttatttaggattttgcatctatgtttatgtatgaaattgacccataattttcctttttaaataattttctagctacattttggtatcaagctttcttttcttttatctgaaaagcttatgtaagagtggcatccttttttttttaaatgcatgttagaatttgctgataaatccgtctggcctggaactttctttcttttttttatttttttatttttggagttgtcctttaagaggtctgagatttttcaatcaatgtctttaataattataggagttcaggttttgtgttttttcttttgacagttttggtaaattatattttccaattatgtatttcaactaatttttcacatttattgataggaaattgatcataatattctattatccttccaatgtctacagcatctgtagtaatagccccctttttattgttgactttggttattttaaccttccctcttttctctctgtaatcaccagtgacttacacataactaatcttttcagagaaccagatttggttttgtttatcttctctaccatattatttacaattttctcaattttgttctcatttgttatttttcttcttctttctttgggtttttctaactttttgagattgatgcctttgcctctttcctatggaagctcacccacagaaacagtaacattattatgtgctccacttcatatttactcttctgttttatttgcagaaccaagccttgttcaagttagtattaaaatataaatgactcccacagccatctctttatgcagtgccataaaatgtgctctaatcagaaggattttatattacgtgtttttaattattcttgtgaatcctcaatgcccaaaatgaattggcaacaaatatttgtctgtagatgtcaagatatttcctcatactgatatacttctcagcataacctcccatttagtttctttgctccttgctcctttcatgctgaaacaaatcctttacccaatttcccctacaatctgaatattccctgtttttggggaactcaactcaaatttcttttgtcctagtttctttttttttaacaagtttcacttgttatcttactaacagtgtatttaataaagtcgatgctcaataaatactcttgtctcaatgaataagcttcaacctctttgtagctatattaatatatttatgtattctataaagtctaattggtagcctattattattatttttttttttgagacggagtcttactctgttgtcaggctcgagtgcagtggcatgatcttggctcacggcaccctccgactccctggttcaagcgattctcctgcctcagcctcctgagtagctgggattacaggcacacgccaccatgcccagctaatttttgtatttttagtagagacagggtttcaccatgttgcccagggtggtctcaatctcctgacctcatgatccgcctgcctcggcctcccaaagtgctgggattacaggcgtgagccactgcgcctggcccgtaggttttaattaatatatttaaattttcttggcatttcagtatttctatattataatgtgaattattttaaaatactttatctgattacaaaggtagcacacacttgttttatcctaaattttctcaactgtttgacttgaaaagggggcagttactccatgatccaaacctcaaaactgaaatttgtattttaagatgttttctctgcatatgctaatatacatatgtgataattttctaaaacttattatactttgaatattttctatgcagtacattaatatctatctcattcttaatactgtgtagtataattattcaatatctgattgaaagacgtacagtgtattttcatattttactgttactgagcagtgtaatagcagacatcctttgtacttataactgtctattgtgagtatttctaaaaaatagatttctagaatatcaattgcggagacaaaggataaattattttattcccattatacacgaatgtcaatgctttttcctccacattcttgccaatacttcaaaatattacattttttcattgttgttatctggctaggcccaaatattgtgtggtggtttatttatttttattttctttaatctgttttcacttttcttggatggtttacacttatggatagtaaactcctgtgatggtgactcgtggtcatccaggttcttttgcattgtgtgggttaggatgggcaggacacactcttgtatatgtaccagctgttggtttatgtgattttttcaggtcaatctatcccatctgacaatataccttccattaggctgacagtctgtcatgcacacagtgcacacacacaattatattacaaggctgataaaaccgaattgctctgttccagtggttctcaactgggacagtttttggttgcacctttagggacagttggccatgtctaaagacagttttggttgtcataattggagtctgcgaggtgttactggcatctagtgggtagaggccaggaatgctagcaaacatcctgccatgcacagggcagcccccacaacagataattaaccaacccaaaatgttgatgctgccaaggttgagaaaccctgtggtctattgctgtgacattttagtgcttctgttgtatcacaagtgtaccaatttgtgttaattttaacacatttattcttgcttaaaaattgggatgtatcttaaaattgattgattagaaagtattacggtgaattttcattggcagaattgttttttctttcctagtgatactttaaatcatgatgtgctttacatcttaccacccaaagtcttagatttgaggaaatatgatatgattgtgtcttatcttttatccctacatatgtgcagtctaatttcagtgtaggaataggaagtctcgtgtagcatgacagtgtaattgctgtatttgtaggtattaaacatcaatcaatgcctagctttgtacccataggcattccactttgtgcctgctctaaggcaaaacacaatattcaatgctggaaataatttcatatttagttttatgttaaagtagttcctcttagatttagtaaatagacaaaatattgattgaatgttcaaatgtagggtggaatgattgatttattcatttgggaggttgtgaatcattcctatatctattgattttgttcttcatttatattcattacctttaaattcaggaaggttattgaaaattcagggggaaacatttgttaggttgctaactccttcacactaaaccttctatgttttcttacatttacaagcagtctaataatccagtgaatcccttacatactgaatgttgggaaaaggtcatgacaggaatatctagttttcaaatcttggtttgttaaagatcagaaatcttccttccagatcttggtttgttaaaggtgatgatcacctaaactaaagcatactcagatgatggctgcttgatataatggagtgagcttttattcctggctcttataggagaaaatctgtaagtggtcaggggaaaatcgatttcaatgtgtactgtcaattcctttttttgcatttgtaagtgagaaaaaaattaggtggttaaaaggtggcagttttgagttattaagaatgatatggattagcctcaacttccatgggtcactacgaggtagccgctgatacttcacatctggttttggtttgcagtaactgacaaagaagcacaaggtatgtatagccctattgttagtgtcgttccactcttttaaagacaaaaagctccccactccaaaagtactgaaatattttcaactccaatttacagattaggcaaaacctcttgagttaagggtcactaaaggcagctgaaaaatttctttgcaaacttctcagtgttctggctgttaaagaaaaatagtaaaataaaaagagctccccagtgtaagaattccatgaaacagagagtgacgtgtgagacgcattaatgctttccattcctgatgaaaagctcgaacagctttaagtaatgtggaatccagtatctcaaatcctagctccgtctgggaggtgagttttgggtgtcctagctccctgggattggaagagcaacacgttgtctataggcattccatatgtgagtttaattatgataacttgacttctttaaagaagctttttagatgtttggggagaatcccactcaggactgtggtttttctttctcctgctttctttggggaaggagcacacaggaccatggttcccagaaacggagacacactctgtgaacctgtgcacgtccctgtgcccacagcgaaggcccctccagtgatcagccaggcccaccattgcagccttccagatggctctcattagagtcaaaattgactgagggaagcccctggggcgtcctggaagccttagagaccatgctagggacagagcctctgatttctaggagctaatgtttcagagaaaataataacagcaccttctaaacactagagcttttctctttagtaactcaaggtaatgaatccccaccctctccctctgcttctcatttaccacccctatttctctgcaagtcacaaaggggaaaattgaagttttctcacatctccttgggaaagtaatctgaggttgatgggctgagatgtttccagagaatgggaatggggtgccaacagcatggaggagcctggggagctgctggtatcaggcatagagtgaagaccaaagttagggatgggagaggagggtatctactctcatggggcaaagtgaccctgaggcacctctacatttaatgagcctagaaagaaaaagggtggaaaagaataggaaggaactgttgatgttcccttcttatgtcctttctgttgggtcaaaatactgttgtaattttggcatatttttctctctatccaatatgcaagttgtttgtttggctgaatactgcttcacttcttttctgcacctccagtgaccgacaatgcttagcacataggcaatgccaatcaagattgatgaatggatgaatgatcatacagaaggaatattttctgctgtagcaacgttgcaaaagtttcttcttaaggaatcttctgatggtatgccgatgcccggttgctatataacaactcactgcaggactcagtggcttaaaatcacaatgatcactttattatttagaatctctcatggttccagggcttgattgggctgagatagatattatttgcttggagtctcttataggtttgcagtcaagtgccggttggggctggagtgatcttggtttcttcatttatacctctgggggttaatgctggctgtgggctgggactgatgactggaacacctacaaatggcctcgtcacatggcttgggctttctccccgtatggtggctgaggtttaagagtggctgttcccaagaaaatcaggtggaagctctatcacctttccaaggtagccttggaagccacatagctgaacttctgctgtagtcacagcccaactcagattcaaggagtgggaacgtggacctcactttctgatggaagcaaagtcaatgtcactttatagaaggttatgcatgatgggacatcctactgggccatcttgggaaatacagttgccatggtggtatggcaaatgtctagaaatgcaatcaatataccattctaatggtttctgataagtacgtgtgaaaccaacccagttgcctaaatagtttggctggaaataattttaatcagagttactttggaaaattacaaggactaagttgtatacaaatgggagctcttattttatattgaaatccagataaatctgctgtaaaataatcatgatgccagcaaaatagaggatgtatactcatccactcatccactcattcattcattcgttcttacagccggtattttttttttattgactatccacttgcttacaggtactattagctcaattattgagacggaaatcccataagatacagatttgggaggcttcttagagaaaatttaccttcctcactgcccaatgactcaatctaagaagacagcttaaaaaagccacttccacagctcacagggcctgcagctagacttgggagagaggtggtgacagtggggagaagaggggtggggagcagatgacctcctgctctgtctctctctctcatctgttcatagatatcgataccatccattgtgtgtctgtgtttgcctgtgtgtctgtgtgtatatatgtgtgtgcatgtgtgtatatgtgtgtttatatgtgtctgtctttgtgtgcatgtgtgtttgtgtgtctctgtgtgtgtgcatgtgtgtgtgtctgtgtgtctctgtgtgtgtgcatgtgcgtgtgtgtgagagagagtgatgggggagccactggttcctcacaacttaagtcccagctgtcatcttaactttgtggatggtcagcaggcagtttaaaaacaaatgaaggcactgatgctgggcacgttctgttcagaactgagggactggctggtgctttggccacagctgggcctggccacattcctaaagaggagccacagctggctggactgaatgaaactggctgggcctgtcccagttccctcctgtcaactgctgttgagagaacctcacccatcccaggggagtcccaagttcaagtcgaactctgggctcttgaagggctctcctggactagccactgacacagccagtattgctctcccctgatactcctgggctctgtggccggcttcattcattcattcattcattcattcactcattcagtaagtgcttgttgagggccatcactgacacagtcatgagggaatcctggggttcccctcccagtgtcagcactggggctccgggaagatggctgccttccatctccaatgcattttaatttcttctttgaacaaacctgcaaagttactggttgattgaaaaaggaatattggcacaaatgaattaaatgacgcatcggggtcaccgagcagttggggatgaagccaaggtccctgttatcaggatgctgcatggactcttcccttcggagaaatatcacgaaggctccccgcctccagcgcgcgccagtggacccctcctgtgaagcagaggttagccctgcactcagggtcctcagttcctacctaagccagctcatcattagcaattcgtattgtgcatgctggcaatgcagagcccaggggcgctttttgtcgagccagcgtcttttatctgcagttgcaccccagcgaagctgggaccggaatgtacgactgttacagggtccgggcctcctcccatctagtttgcaatgcctctcacatgcaaaggttatgtttgtttccttttaaaaatagcagacgagcaggtgacacactgccttaattatccttctgtagaacacattgaaaactagcctccctgttctactggcagagcgagaggaaaatgtatcctaaaccgcagtgggtgaagcctcttcagatgtcggtcagagccttacccacacccagccccgcccgacagccgtgaacacagacaaacaactgtcacccattgacctcacgattccttggtatatgaaccaaagtggaagcggcgagaaaaggaaatactgcagatatttttaagtagaagcaaaggcaggaagaggaaagttgcaaaattggttatatttctttttgcttaagtgcataatgtttggatgaccaaaaagtcagtgtaaatgtataataagattattttcaaggaaatctgtatattaagttttaaggcctattttacttcatatatacataaagtaccatttttagaagtgctatactccatgcatattccaaaatactacacgttttttttgagaaaggaagggaccgtgaggcttttttcacatctgatatattacagtataatccatattcctcctataacacttagttctggaaaaggatctactggtgtctgagtttaggcaggcactagcactgacgtcagtattgtgtacagagaaaacaaacatactctacatttaccgaatttgatgcaactcacatttgggaacatattgaacaatctaaaattattgtaaagtggtaaatttttcaggctttaaaatcattaacagtggcataaaacaattatacaatttccatggacaaatctcacccccccagatttatgcctttaatcttatattcagatctgtgtaattcatgtttgctcctaaaacgtgtatttctttatgttctataataatgaacaatccaaatttttcaaaaaaaaacaccatttctgcattataaatgttagatcttaattttaacaagtaaaaaatgagaccactttgtaaaataatgtcaattcaaggaatttaaatcaagaattaggcacactagtattctctctaaaggcctttttgaggggcatttagcaccctctagtgacaacaattcaagccgttcaaagggaacttccctgcacgactcatgtctggtttctagctggcaagtcaacaatgcagtgtagttctttaggcaggaggtggttgcttcctaaaatccttgaggcaggattatttttgtagctgtaaataaaggctggaataatctccaccaggcaaccgcgcagtgggaaaaccatgatttatccctatcggctataatattctttggcttatcatggccagtccactcagaaagaacatttctagtactccttgaacactgcagcctttcccaaaacatgtgctgagatctgtgtgggcatcagatgacaacaacaaatttactgatatcatcatttcagttcaggtcggtgcatttaacgggatttaacacattttcataagagtgaattggaaaagaactggcctgccttcacttcagctgcacctctgtgtcctctgcgttgcttgcagtgggagataatacagtgtggagagggtgaggtgtggagagggggcgagggatgaggagggctcaggtggagaggataccatgtggagcgtaccatgtagcagttactgcgctgagacagactcccagtgtcctgtgctcctgacttcaggcacgggtatagggcttcattgcatccgcaggtagcctggtgatactcatgcaaatataaatgaatttgtggcaaagattttttgccttcgcttcatttctgattccatttgtgatggaaataaattagtaaataaatcatcaaatgaggtgatgctgaattaaagcccacctcaaccgaaaactaaaagccaactttagaaagcagcaggaaaaattattaatgcaggcttctacatcaatttctatcaattgaatgctattatagtgccacttatgatctttctttaagaagtaatctgtattttctttaaaaataattcataaaatagtgacagattaagacaaaaataagtgatgctgtttagtatcttataggtgagattgacacacttcttaaaaaatcatttaaaactctgactagaatcaaaatcaaaattaatttcaacaacctgggataaattctcaatttggccaaggatggtgacaggggacagtacctgggaaaggatactttggatctgagtcgggggtagagtgggatgccagtcagatgcttttgtgaatcttaattatatgccctgtgggcatacgaagccttatgggcaccaatggcaacgtgatgtctgtagcatctatgctcagatatacccagttatacggacaaagaagttgaaactcatttaatggtttccaaattatatggagaagcctaataattggaacaatacatttaaaagttattttaagctaaataatggtgacaaaataattactctcctcttaggtttctttcttaaaaccacagataatacattgacctatttggagtccttgataatggttttaatattcctgcatttttaaagtcatatggagttgagtaagagcaaaattggcctaaacttgagaacgtgtgggatgcttatgaaattgtgtttattgaaatcattgctccatgggagcttatagaactgaactgacgtgtgcttcagtattaaggaaattgcaacttggtgttgagaagttgaggatttggtatgtgataacagtttccttggtttctattagttcagatcaaccaagagactgaagaatacattcaccacttagagaaagtgttgaaacaatggttatttaaattgtaattggattatttcttaatgtgctgctgggggatatggcactcccctacccccccacacacacaccctcatacacacactcacacactcatacacacatactcacatagttgtatccaatggagtgaagctgtaatcatgaagtatgctgtgaacagaaaaaccgtccttaaacagcgctgactgggtgcccttgagggctgagagtgtcttcatgccgcgtatgttctcaggcaaatcctccgactgctgcagatggaaaagttccatggagtgctggagttttccattgtgcggcagccccagatgcttgattcttatctacaatctcaggcatgttcctggcaaaaacccctgggacatcgttcttgcggggctctcatgaataatccaaacactatgcattttaaattcatgtgtcatcttaaggacaatatacagcacttttgtcctattgttttgtccttaaaaacctgcgtttcatgggtcgctcccaggctctgaagttttatgtgtgcagaatttgaggagactgagataggcttcccgaatgccgagacatgcggtgactggatagagccctgtaatcctggcttcctgagtgcccactggagttcctggcaggaaaaggccattaatatcacctgaatggattaatgccgcatagatggcctccacgaaactcttgagcgtttctgggttttcttaataaaatgaaaaaaaaaaagagctctatgcttgctgtagacatttaaaaaagaacaggcatttgggcatgctaaaaggtttgacacctacaagtattgtgggctgcactttttacagaacatgcctgtatttttcagatatttacaaaaatgaacaacattgcatgttacttacatatttttatattaggatataatttatgtttattacaaatttatgttttgaaaatataagtgaaccaaagaagaagaggggaaaaaacaaaaagcttctctgccattggtattataagatatagctgtcaatatttttactttgcctttttatttattttttattttttgactattacaaaaggttattggccgggcgtggtggctcacgcctgtaatcccagcactttgggaggctgaggcgagtggatcacaaggtcaagagatcgagaccatcctggccaacatggtgaaaacctgtctctactaaaaatacaaaaaattagccagggtggtggcgggcacctgtagtcccagctactcaggaggctgaggcaggagaatggcatgagcccaggaggcggagcttgcagtgagctgagatcacgccactgcactccagcctgggcgacagagtgagactcaaaaaaaaaaaaaaaaaaggttatttaacaaaaagtctaatatgaaaacatacatgacctaatttttacatatagtgaaacaggccctttggagaggggacatgggtttttctgttgaacagccattatttatactcattccaaagtttctaatatgatgatactatttccttgtattaccaccgttccaatactgttctgctgccaactagttgacatctccacacattcatctatgacaagattcataaagggatcgagtccccataatattccttggacatgtctgccaccattgcatttcatttttcaactcgggaaggttagcttcgctcatggtgtctattcctcaggttcacagatgctttggaacagaatgcacggccatccccaactgcctttttatttttaacaaaatgagtctatggatataattctcctatatactgtgattttttaactaaccaggtaaaatatcagagcagttttccatattgctaagtgttcatctacgacatcattttcctgcaatgtttttgaggaggaagggcgttccattgtagggatgtatagggcagggataaagacgtgaatgagtcatgagtgaatcttctgttgtgtccccacagatgtggaggttcagacggatctcctctctttgctctgcgcatgtattacattgagaaccatgtggctgtcattcagagtgttcttagctcctaaccttcctccccatattccatacagagaagttagtaagggaacaagaatgagaacttgttcgatctttagaaaatgggaagaaatgattttaggataaataaatactagtgtttcttttattgtgacagtgaatttatggtatatttatgttatattattttgtttctttctttggagtaaaatgtgaggagactagtggaaggttttggcagattcacaggggatgggtttgtggcagagaagcatgcaagggaaatgtgtgctttattcataggttctgctgtccacagctactgtatgggctgtgctggtctagtgtggtgattactgcatctcaaggagagtgaaaaaggaccctgccctgataggctcatggcaggacgggcctcaggtaggggccgtgtgccagattgccccctaacttggtccgcgtggtggcttggagggcatatttccctagggagaggaggtatcaggtgggaaaggcagcctggttcttaggctgctgggtggtgtagggatgaggccatttaataacatagacttggggtacaagtgaggaaagctagagtgatatctatatcttcagataatttccccataggataatatttgggaaacggtttctgcactgctatattctagttaatagatgtgccttggccgggcgtggtggttcacgtctttaatcccagcactttgggaggctgaggcgggtggatcatgaagtcaggagatcgagaccatcctggctaatatggtgaaaccccgtctctactaaaaatacaaaaaaaattagccaggtgtggtggcgggcgcctgcagtcccagctactcgggaggctgaggcaggagaatggcgtgaagctgggaggcggagcttgcagtgagccgagatcgcgccactgcactccagcctgggcgacagcaagattccgtcccaaaaaaaaaaaaaaaaaaaaaaaagatgtgccttgtcctatcaagagccaaagatttttttaaaacactttacattaaatagtcagagattaccaggcttggatgctatgatgccatttgaaacatcaagaattattctctttgaagacaacaggaatcaatcaaacattttgtcattagaaatgaggaggagtttcctttgtaaaattttggaacagaatttaccactcagtatccccaaattaactttttattagatcactttttatgtttgtatgcatttccaaaattagacgcagtaaaacttatggatcgaatattgatcaaataatagcatctgtttttctcttttttagtatccaataaataaatttgtctcttataaaacaatatttttattagttagaaaatgatggatatatgcatgcatgtatgttatacataaataaatatgggagagagagacagagattgagagagagagagcatgtgtgagagaaagcagagaaaatgatgtacattggcaccagtagacaatcagagttaaccaggcaaagggtattaggagtttggtgtattatcttgtggcttttctgtaagttggaaattatttcaaaatagagaggtaagaaatcccactcttcacagtttgatttgcattaggcaagaaccagggagttaaggccaaatcatcactgaagcattaggtcccagtagaaatgctgatctttcctgctgcagggaacaactgagggctggattagcaaccacgaggcgtgggtgaggcgggaccacacaggattttcttccgtggctatttcattagcaaagcgttcatcttatttaaagctggtgtttggtaaaggcataatcaggtgccatgtgttgtggaggccacagttaacattttacattgatgcttcttaggagagaacaaaaagcaaggacactcagggaagctgagagagcttttctcctccgcactccagaattctagtggaagctgcccagataaaacagctcaggactttgaaattttcggggaaacagaattttaatcagcctgccatcttattcattgttcagagatgaaaagagcggaaatcaacaccccctcataatgtaggtgctgagaacttaggttctgatttccacagaatgattttcttacaatatactctctttcttttcttttccttctttctttccctccctccctccctttctccttccttcctccctccttcctcccatcctccttcctttctctctctcttctgtccttcctttctccttctccattttttctcgccctcttccctccctcctcctcctcctctccttcctctccctttccccccttatctttctccttctcctccttcttttgtcctaacatgaggtgataaatcagaggtatataataaaagccagaatgacctgggctggtggacagaactctgacacatgccggcctaaagtctgagtgaaatccatttactgaacgtccagctctgcaaccaggaattgtcagatgactcaggatttagtctattgtgttcttggggtcgcctattgagaccacacctctttatgggtcctgcgttcctgtagctagattcaaagcaaaatgtttcttccaagcaatttcctgaaaatgagtaattaaagtcctgaaaccctctaaggaatgttcaggcctgcattcgctgtacttccttcgaggagaaaacagacctgtgaccctgaacttatagcttggattttagacatgtaatggggccctcacatggcatctctgggtagccaaaagttctatgaggatctgttgtctgcaacatggatgtctgtcagagtgagaccagctcactgatattccgggacatttgtagtcacttcagttatttgggttttaataaatacttgaaaacaagacttaggaaggtttatttttcctctttattttttgtgtttactgtaagcctagagtccttgcgttttcaacaactttgttgtagagcaaataaaaagtgcaggtatttggaaggagaaaatgaaactgttctggaacacttatatgaaatgttgaataaatataggttgttaaaaatcagccaggcaatggctgttactgaacatggccatctattaacatgaaataaactccacctgcaaagtttccttttaggagaaaggagctcaagtcctctgtcctagtaattctgcgaagaattgggctgcgaagggctgacacccagggcagtggggtgccctcaacgccttggctccaaggtgcttgcagcccgtgtgaagccatgcggagtcccatcacatctgcatcctgccttggtctcagtgcagtgtgtcacacggcggcacaccggtcacacctgctgtggcagtccccatcccaattgatgccttttctttttttaattaaaaaaaaaaaatctcctggctgcatatcatcaagaaaaacaacattgttttcagggtctcttatctctccactcccaaatatcctgtttctttgggctggacagccaggaccaatagaaacctcttcctgccattggctgacttcatttcccagacttagcacaatctcatccgctctaaacaacctcatcaaaactactttctggtcagagagaagcaataattattattaacatttattaacgatcaataaacttgatcgcattatggccagcactattaaggtaaggaaagggttccttttaatttgacaaaatcttgttcttgttactcttttctttggtttcctttatcaaggcagataagttagggttgggcaacacccccactgccacaatagaggacaacaagatttcctttgcactgcctagtaaatttcctttttcctactccaaccatccgcaaggcttaaaaacttcaaactcagaaaaaaattggggtttctaaattcactgttgagtgctgtggattacttttggaaaggcttttcggagcgcttctgaattttcagattctctaactatccctaacggtgcctggatgtgtgtctgagaaaaggcagcagactcggagaggttgaagggtcgggtcaaagcaaaagatgcgtttgtgaatgtcagacatttggaggctcttcagtggctccttagcatcagggatgccaggcagtcccagtggaagcgaagagatactcggcaagtggctgctggtaatgggacgcaaatgttgacttgatttgtgggacatccacgctgagaactgagtgctcacgtaactcaaatgggggtaatttggtttgttccactatatgtttatcttcaataaaatacctactgtctgtgcactgtgagtaagatttcttccagcaatggttaggtttgcggagattggaaagcaatggccggtcggttctctgtgctgtggggtgtttggtctgatgcatttccttgcctaagtttttagtagatagcatgtagagattaatgtggaggtaaatctgcacaggtacaatcctaaatatggcctgattcctggaaatgaagccaatttaatggtgactacaagtcaaggggcatgcagtcttgaatgggggtccgttcagttgttttaaaggccaccatgccttcgtgacatttgtagaaatgtgaaaaatcagcaacaaaagcagatgctgagtggagggaaaagaaaattgtgtttgttgcatgtctttagttttgctgcacggaggtgagaagcatttggtggtgttttcataaggcttttagtttgttggaaagtgcataagaaaatggaagtttgcccagaattgggccaagccattttcaaaaatactctttggtttggtattttcataatttgaaatgtttgtattagaagatttgactcatatgtaccatagaaactgtgtttgagaagttcagcttttatttctcaaggtgtgttcaataatatattaaaaatctgtgtaccaagaactttcaccttatacttttctttctttggcttcaaggattggaatctgctgaaatatggctcctatagacaggaattataaaattgagagttaatgtgccctacttatagctacatgaatagaaattacttgattttgtgacccaaaatgttatttttttgttcttattttcatccttattcatatgcatgttaaatcaaatattctgtgtaaatcttgaatagcttgggtacgatcttatgtggttttttttcccaaaaaactcagtgcattaaaaaggacattgaaataacagaccatcctttagaaggtaggtacattttgcaaaacatccaaatgtgttatactgtttaatttgaagtatacatttatgaatacatgaagctattttgaaagtttgaatattttgtgattttctgaacacttttttggaaataatagtttacacttgtctaaggtactatgcttgatttaacattttattacattgcattatgtgtttattgtatgtacccaagtgaacccttagaatgactacaggtgaatttttttttaatcttctgttaaaataggccctctttataggtgacttcctttaagacatgtttctgttagatttcctgggtaaagtaatgagatgattttacagccttgtttatagagtggaaaaaggaggtcctgagtctgttgactacagtttcaattacgttagcgcaaagcccaagttagcatagggaaaatgatggctgtccactggaattaggaaacagccccccatagaggcaatttccagtctcaatgcactctgtttttttgttgtttcagtaaataaatcaattagtcgattaggtatcagatgctctgaattttttaagttggttttctgcatttgagtggagtttttatttttttgcattaacatttgtaagaccctatgagacactatgaaaagctaaatattcgtatccagtctttgtgattcttaccatcattttcccttggtaacttgaaattgggaacaaaatgtttcaattggaagaagtaaaggaattttgggaacttatgtgagagtgttcatttatctctaagtgtctgtgaattttaagatcagcttaagagttctagtaaagacttggaagcaacaaagctgatggtttgcagacaattcactgattggttttggtgcttcccttgggcattggtgacatctgacaatattgagaggtgctgaacctcaccggccccactgtccccacaaacatctcagtgtttgctacagactgcagggatcctgctgttgcactgaaaactcgattgtgcttcagttaggagttttagcctaatttcccaaagactttcctgattcctttttttttaatgccatctgcaatttgggaagtctagtgaagcctacagtcctttctcagaataatactttctggtgcctaaaaagaaatacatagaattacaacagaaatacagtcctctccccggaccttttaaggagaacatgaaccccaggttgcaagttctgatcctagaaagatacttaatgtgtaaaaagggaatgtgggggattttccatcatcacagagatctgacattgaaggatgtggagagagccagcagccggcagcagcatcaggggaaagcatcttaaaaatcagacaggacatggaaagttactaacaaggcttggtggagacctgagggcaccctagtgctatttccatgacttgcctaaagaagttacttttttttgaattaacagaggttggaaggtttgatggtaattgaaacacgacctgataggactcaattttattaatttaaagacataaagcttgcattatatacgccacgtctgcacatttgcacttcttgaacgtttgctatcacatgtgagggaaacttaattaagactaagagttatatgaagaaagttaactcctcacagaattttgatggatgtgattaatgagtttaatagctacagatttatgatttttcatcaacctgttggctaagtgaaatacgaattgcgtcagtccttgttactttagggggattccgggagaatggaaggaaggccaggggcaaaatgccgctgccctgctgtgcataagtcatttcagagcatgctctgagtgtttgtccttgccgaaaagtggctttacaggcaactactttaaaacaacttgctgcttccgttcttggtcagctctgtgatccaggctgccctctgtggacacagcacagttctccctggccctctgcctgtgtgtgcatgcacccatgcatgccaggcaccctgactcagtgaccctggaaagcaggattgagaatggctccatctgtgggcttttcttcccccatgaaatacagtgcaggactgcaatgctctcagacaatgtgctgagcctgaaccatttcttaattatctacgtttataagtgattatctcataaagtttttgttttgcaaaacagatctttatttaaacacaaacacaggttaacaactcttgaaaaagcatacataaaaataagtaaatgaaacaaccatttctgttgtcttcaggaaaatatgactgatacatttagaactttagaataagattccctctgtgggagtggagacccaaagccattataggcatcccaacaatttggcggatttattggtttaacagctgatacataagagaatcacagagtaagggccatggggaagccagacggatgagagtttctctgaaatgagaaacctcagagaagagacagggacagtctccaggctgttccagcgtttggtagcacactgtgctctggcggggtcttttctttggagctacctcaaggagagccttcttgtcccctcctttgaccccacaggatagaggacaactgctccctggcctggggattctgtcagaccacccctgatagcgcttctctcaccttacgtggccgcagacacacttgcatttgcttccttcctgttgtgaccctgggcaaggtagctagcctgtctgatctcagtttcgtcacctgtaaaatgggatcataatggctaccctgtctcgcacccatcctcaataaatggcagatgccatcagacgcccccccgcggatgtaaccttttctaccgtattgtctttcaggctctgcactcactcgtctcaacatttcccacggcccagcttcagctgtgaagcccacagccatagactgctctgatgtgcggcctcccacacccaggcagggtacatctgggtctgggcagccacaggacagggaaggaaggaggagggagcttgcaggggtgcttgttaaaggtgtagcagggcaggtaccacacacaggggcaggtggagcgtccaggggtcgcccgaggtggtgctggtcagagagggttggcttcgtcctgttctgagccgaggctgctggaggagggcagaggcctatgactgcatcgtgctcctggttagggcaggaacagcaccctggaataccccactctcctctttactcctgaattacaaaaaatacatcttgttctttagcataaattataaacataaaaaattcttatggtagagaaaacgtttaaaagtcatcacaaagtcaatataaattgttcagatcctaaccaaccacagcaaattcctaacaattgggatatgtctctccaccgtgtgtatctgtttggccttgtatctacctacctgtcctgctcttctcagttagcattgttttacaagcattttcccatgttactaacattttttgataagcaaaatttttgtttcattatattctatctaaaatatgtattaccattttataaccaatatcctagtgtataaagtgatgctgcttgcgatgtttcactcattatattgcagtacaccatctatttaattttttgaatactttttattagtattggtgcctagaaaggaattattgagccaatgggtatatatattttttaagtctttgccaaatttaaatatttgccaatttaaaaaataattaccagattattctctggaaggattataccagttctccctttttctagccacatatgagaccagttccacactacacccataacaactctgaatattttactctttgaatctttgccattctgacagataagaacagaatctcatttttatttgtacttctttaattttagtatttcattacatttttttgtttgtttgctgtgaacccattttggctagtggtccactgtgacctctggattttttttcttatttatacttttattctctgtttggtctagcttactttccacatatttcccctactgagcttggccaagacatgttttataaaatttcacatcgattcccatctgtccactctcccactcttcattttctttcctgtcagcacattctcccagctttgcttgtgtttgttgttgagtgtgaataatttatgtatacccactgatatcgcagaagctgtttttagtgatatcttatccatttcttctgtgtcctcaacagtgactggcaaagagtagaggttcaataagcacttgttgaaaacataaacttaaattttaattatttgaaatcataaagaggaagttaagatatcagagtaatgtaattatcattgtagacttcaaatagaattcttatgtttttagagacatttctcctagtaaaataacgttaattaaaattgacttaaattgatgtttaagaaagtataaaaaatgtagctgtagtatcttgaattcataatccaaactaacatcatcctaataactgcttgttatgtgccaagtcctgtgctaaactctcataatgtctcatgtgatcctcacagcagcctgggtactgctgctttcttacagataaggacaaaggattagagaggcgaagtatcttatacaagtcacacaaatctgtctcccttctctttatcatctgatctcttttttcctgctattcaccctagctgtacatagtgaattactgtgcagagaaacatgatgtattaagtgttatggagacacatgaaataattggataatgaaaattattatcgctggttactttatgttatctactcttctgggaaaaatcccataggcagcaattcttatactctaggtggctaatcaaaacaaagttctagaaaattcaagaggtaaaactctagcactgaattctatatttgctcagtgacaagaattctttccatatttggcgagatccaaggggcagtgcttccagattccagatcagctgctgatttaaatttcctcatcccaagtatcaacttccttgcactcgtcttgggcgtcaataatgaacacgcaggtcagagttttccataaggccttaacaagtctttcagcagggtgttcatggaattaaactctgggaagaacggtaatctgctgttgtacacagataagtacagagacattttgaaaagaaatgctaaggccaagcaaaatgatttatttttaaagtgccacatcagaatccaatcataacattaacctcagggctgttactttaaacacgtttggtaaaaacaatgcttgtcgaatttttgaaaatataataactttatgcaaagatcccgcactcttgcatttaacacattccactttttaaatccttctgccttgatgatttaaaatctcccttgctggtttttttgttttttaaatttaccaagtattgatacagaatcaagcactgaagacaggacccttctgctacctccacattcacattccccccaaggccattcattcagatcgtcagccagcagtgagtttctcatctccatgctctttgggtttcatcgggttttattgggtctttttttttttttttttaattttgacagtgtgcacatgatgctcacctttgaggaagaagaaactgttgaaacaacactttagaatctgtcaacacaattagtttgtgtctcaatttgaggtagatgtcccaagacattgctccaagttaaaaagaaaaaaaaagtatgtggttttgcattgcgtagtcctctttggatccatacgatatgtgtgccttccctgaccttccagagagcatcaaaaacatgaaggttgaatccagagagcacagcccacttttatctttggcccagggaggcacttggtactctgtatttcttcgtggcatccttaaaatagcctctgtggaaaagggattggccttatcttccgtgcaacggatgggaggcatagatatagctgctggcaaggggaagtggaaagaggcccatctgggagagggtggcccggagctttagtttgatgctgcaggacttccccaggtgaacgcacctctcctggccctagctcccttataggaaaatggaggtggtcagctccgccttctccacagtgaccatctgctgactgtgctgctgccaggacgcagggggagctaacagcagtgcccctatcggatcttcaaaccggggaggggtctcgtgcagtgggcaggggaaatgggctcccacctggcttttggggttcactccctggctgttctacttcctggccatttcacctttggcaagccacagcctcacaggagataggcttttccatcggtgaaatgggtagagtgatagttcctacttcacagggttatagtgagattcaccaagtcgcaagagcccagaactgtatatggcacacataagctcctcaatcaaagttagttaattttactattcattcaagccaaatacatttttcttctaagactaaaatcagggaatctatgaaaagcatttccccctaccttttttttttcaatttctacaacagtttgtgaattgaattttgttttcaattagccaatttgtccattttcctgtgatgaacatgtttttatctcttcattataaagtaagaactctgacagacacagtgagctcccaattattcacgagcacctgatctgcattggagattgcttaaaacagggctgggaaatgcttgctggtgagttcaccggacactgcacagcaggtcctggaaggagacattcagggcgttgttaacttctgtgtctccctattcttcttattctccttccatactctttctctctcattgcaatcgctatccacctggaaggcggcttgaaaaacacaaaagacaacaaggatgatgagggggacccctcctgagcctcttaaatgctgagggatccttcctggacctgtttttattcattccaagctgcctctcctagacaatcacttctcttaccccaggaaatctgggacggtgcaggtttgcaagcttgatctggaataaagaaacaaaggaaaagacggaccaggaggcttggcctacgccaggcaaaagtcagcaaaagcagccactacacatctccttttgagttctaacttttcactttgtcttgtgtgaactcctaaactggaagcatatttatagtcacgtaaaaataagaatattgtccaaggccaaatgtaagtgacttttatgagttattggactttgtgaattactcattctaccaacctgaattaacatagatagttttgttgactttaccttctttgtaagccaaacagtatgaactcggttaagccggtcttaggagaaaagacataaaatgtgtgttgctaggatagcattctagtgaaggaagccacttctttgtttcttgtgcatccctgtgagggtacctctgtccatcccaagagctgttttcatggactcactgttgaaagcccaagcctattgtaaccaattttgataagctggttacaaaataagcacatgtatacattttttaaagccttgttcttctggagatggaaaacatctttttttagatcacatgtttactgctttggtaaacagtaaaatgctgctacagcaattaccttgaggataaagggtttgtagacagatacttcctgcgttcacttcctacacagatagccagcccaaccagagacgcactgatgcaggaagggctcccagtggaaacttcctctctccgaatgcgtggtccattattcgttatctcctctccaaggggaataagcttgttgctccagattttctaggagaattctgtcttgaaacaggtaaaaatataaagtttctaaagtaatgattacagtacctcgttctcatcctcggtgtcatctactcggtgatttttaaggggacgtgattagactagaatagacttgtctatgagtaacatgccccgtaggcacctctgtctcctttgaatcatggaaaatgatgcataattcgaatgtttttatatttggtagaaaaataagtctctttgagattcaatggaaggccttttctatggttagttgaaaggtcattttagattttgctttctttagtcaagcagagattaccagatttgggtacaaaaaatatcagctcacagattgttctctgtgctgattttacagcagttactaaattccaacgaatgcattgtttaggccctttgaaccgaagcaaataaaaccacagtgcacacacactaaacaatagggcatcatcaattagccatctacaggatgtgtccttgcagactggcccctttgtaggagaaaaaaaaatagatcaagtcaacaaacaataacactgaacaataaactaaacaaaataaatagcacctgggagccccttaagcactggcgaagcaccaaagggtgatgtttacacactgtacacacggaaacccacagctccacccagatctcctgcaggtccctaaaatactcaaagaactcagcagccaatcattgctgggtcacctcatgttgaagggtaccccctttggcgatcagaaaatgctgagcctcttaaatgctgttttcattcactccaagctagctctcatagacaatcacttctctcaccccaggaagtctgggacagtgcattgcgaagggaagaaggcagtatctaacagagccttctgcctggcctattccataagtgccgatgactgccaggtggggggcagagattgcatttgaccccgagagactgccagacatggtgagatgctgtcatgtctcacgtagatgttattgcacgaatatattctagtgattttatccacatattcaatatatgtattttgtatttaacatgaaattgaattgaagtgaaattgcccaaagagatattttcctttagggactcatttcttcacatacttttgcttatcttgttggaagacacactatgtcaatctcagtatcctgtttgaatgaagactgctttcctcctatgtatctgttgcccctagacagtcattgtgcagcttgttacctttctgtgaaactccatgagacagctccagcattcatccttacaggtgctacctcctgacacttctgcttctttgcaaaatgacttccctgatctcctgagtctgtattgtttccagtgctgcctgaaccacatttgggtgatgctacaggaccagacagcagacagatttgtcatggatgcctgatgggataggaccctgttggcatcctctctgaaaatctcccttgcctggctagggattgttttattttattttctttagcctgtagcaaatacaggttcagtatctccattgaataatatattgtagaaagaaaggcagtaataaaaacttcgttctttttccccatttgaaaaacaattattataggagtttagaaaataaaaattttaaaaacaaaattaaaataattgatgttacaccatcaagggtctttgaatactcgattcttttttgattttttttgtctttactcctgtaccaatgtatcctttttaaagaataataaaatttgagaaattaaactcattgttattagtacctttctatccacttcttttttttttccaggatagtgaaaaaaaaaaaaaaaagaggagtgagggctgaacttgttacgatttagaaattaaggcccattttccttcttaagaacccagtttctctatatgaagcagatccagaccgcaggtccctgtcccaccacgcctttcacttccctgtgcctcgtttcctcatctgtagaagagagtcagtcatgataataactcctacttcttggtagtgttgcaaggattaagcagcttaatacttgtatgtgctttgaacagtaacgtgctgtagtgtacaaaagatgtaaattgcagaccaggcatgctggcagctgcctgtagtttcagcttctcgggaagccaaagcaaaggatctcttgagcctcagtatctgaggtcagcctgggcaacctggcaaaatacctcatctcataataataacaacaataataataatgttagctgttatgggctgttattggttacttatcctagtcacagtcttcttatttaatttactctcatatctcaattgtttttttgaagtaatcaattatcttccttgattgtgtttgtttccagtatttgtctttggaaaggaatcctgcatttatacctggttatttatagcttcttctaaaggggtgaaagtatttccctacacagtcatgcatcaccatgcccggtcagttctgagaaatgagttgttagatgatttcatcgtgcaaacatcacaaagagcacttacacaaatgtacatggcatagccggctgcacacgtaggctacaggctataagtgtagcctgtgctcctaggctacaaacctgtgcagcatgtgaccaggctgaatactgtaggcaattgtgacacttaacacaatggtttttatgtatcaaaatgtgggaaaggtatagtaataatgcagtagaggccaggtgcggtggctcacacctgtaatcccagcactttgggaggctgaggcgggcagatcacgaggtcaggagatggagaccatcctggctaacacagtgaaatcccgtctctactaaaaatataaaaaattagccaggcatggtggcacgcacctgtagtcccagctactcaggaggctgaggcaggagaattgcttgaacctgggaggcaaaggttgctgtgagctgagatcatgcctctgcactccagcctgggctacagagcgagaccccatctcaaaataataataattattattattaagaagggaaaaaaatgatacacctgtacacctgtataaggcacttaccatgaatggagcttgcaggatggaaagtggctgtggatctgggtgaatcagtgagtggttagtgaatgtgaaagcctaggacatcactatctactactgtagacttataaacactgtatattggccaggcgcggtggctcatgcctgtaatcccagcactttgggaggccgaggtgggcggatcacgaggtcaggagatcgagaccatcctggccaacatagtgaaaccccatctctactaaaaatacaaaaattagccgggcatggtggcgcatgcctgtaatcccagctacttgggaggcggagggaggagaatcccttgaaccagggagttggaggttgcagtgagctgagattgcgccacagcactctagtctggtgacacagcgagactccatctcaaaaaaaaaaaaaaaaagactgtatatttacactaaatttattaaaacatttcttcaatagtaaattcatattagattactataactttttttacttattaattttttaaactttttgactcttttgtactcacttagcttgaaacacaaatatgtggttcagttgtacagaaatattttcattctttatatccttactcaataagctttgttctattttttttttaactttctaaactttttattaaaaactaagacacaaacacatacattagcgtaggtctacacagggtcaggatcatcaatatcactgtttttcatctctacatcttgtccctgtgccactggaaggtctgcagggacaataatctgtgtggagctgtcatctcctacgataacagtgccttattttggaatccttcttgaaggacctgcctgaggctgttttacaattaactttttttttttttggaaatagaaaaagtacactctaaaataatgatgaaaagtatggtatagtaaatatgtaaaccaataacatagtcaactattatcattatcaactattatgtactgtacagaattgtatgtgctatactttatacaactggcaacacagtaggtttgtacaccagcaccaccaaaaacatgtgagaaatgcattgtgctacagtgttactacagctgtatgtcactaggccatagagatttttcagctccattataatcttatggtaccctcgtcctatctgcagtctgtcattgtccaaaacatcattatgcaactcctgaatgtatgctaattgctttgttctcatgctattcctttgaggacagtagagaaaacataagagagttacaactgttattccatttggtggctcaactgacatgttaaccaaactttcaacagctgaactcaactgcatttttgtgagcccagaaaatcagtagttttgataatttaaagttggagaaatgaaggacgttcattgtttcctcccattcttatgctttgggtgatgctgttaaataaatgaatgtgtttgtgcaatggggagagaccactgttctctggagtggatctagaggttaaaaagtcaagctattttgaaccaactacttagagtggcacattctttaggggaggtgagcagggatctattgaattatcatattgctggttaatcatgattaagaatctatagaaccccgaccgggcgcggtggctcacacatgtaattgcagcactttgggaggttgaggcgggtggattgtctgagctcaggagttcacgaccagcctgggcaacacagtgaaaccccatctctactaaaatacaaaaaattagccaggcgtcaagaccagtaactcaaaacgtgtgttgttaaagttctatgccttaagttctgtggctgttgtcatgtaacctttcagtcatgctgatggtgcctattaaaaagcaggctatcagtaaatgtccatttcataaatgaataaataacttcctgcatgacaaatgcatgagtgagtgcatgaatcagtgatgtggctggcaccctatattaaaatcacaaagaattgctgttttttaaaaattttttatttttttgagacagagtctcactctgtcgcccaggctggaatgctgtggtgcaatcttggctcactgcaacctccaccctctcccggggttcaagagattcccctgcctcagcctcccgagtagctgggactacagacgtgtgccaccatgcccggctattttttgtttgtttgtttgtttgtatttttagtagagacggggtttcaccgtgttagccaggatggtctcaatctcctgacctcgtgatccacctgcctcagcctcccaaagtgctgggattataggcgtgagccaccatgcctggccgagaattgctttttatatcatgaaagatggagtccattttccccagatgcatatacaattgttatataccacttatattaacaaatccatacttttccaaaagagtggtttgaactatgactttttgatttattttttaaaagttttattttatatatttaaggtgtacaacatgatgttttgatatacatgaagatggtgataaggttctgatagtgaaggcaaattaacatatccatcatcttacatggttacacattctttttttgtggggcaagagcacctaaaatctactcttaaagcaaaaatcccaagtacagcacagcacggtattattaagcatatcccttatggtgtacgttagatctctagacttgttcaccctgcatatttgctactttatattctttgacctacatctccccatttccccattgagtctttgtttgtttgtttgttatagattttacatataagtgagatcatgcagtatttgtctttctgtgtgtggcttatttcacttagcataacgtcctccagattcatccataatgtggcaattggcagaatctctttttgaaagctaaatgggccgggcatggtggctacgcttgtaatcccaacactttgtgaggccacggtaggtggatcacttgaggccaggagttcgagaccagcctggccaacatggtgaaagcccgtctctactaaaaatttaataattagtggggtgtggtcgtgggtgcctgtaatcctagctatgtgggaggctaagacaggagaatcacttgaacctgggaggcagaggttgcagtcagtcgagatcatgccactgcactccagcctgggcaacagactgagattccatctcaaaaaaaaaaaaggctaaatgatattccgttgtatatatccaccacaatttattttatgtattcatccattgatggacactttggttcctttcatatcttggctattgtgagtaatgctgcaatgaatatggcactgcgggtatctttacgagatagtgattacatttctttgggaaagtacccagaaaagggattgctgggtcatatggtaggtctatttttaatttctttaggaacctccatacttttttccacagtgtctgcaacattccatgttcccaccaacagtctgcaaggattcccttttctcacattctcgccaacacttactatttcttgtctttttgaccatagccatctgaacaggcgtgaggtgatacctcattgtgtctttgatttgcattttcctgatgattagtgatattgggcaccttgtcgtatacccattgttcattattatgtctttttgggaaaatgtctatccacgtcctttccctatgtttgggaaggtcagatgaccgggggctgcccagaatctaatgagtgctgccgagtacatgatggtcccttccaggccatggatgggaatgtttcacttgtaaattaaaagcaggaatacagtttccaggcaacccatagcctgcattttgctacatgacacttgccttgatgagcaaaaccaaacaccactttcatttttattgagcagcaacacctaccagcatttatccaggatttgcattgggtcattgaaatattcaactttgacaatctattatataataagtctttctggacatgaactagtgacaagttgtattaatgtgctatgatagggactattcatttttcttcttttgttactacagtcacctctttgaaatgtcagtgaaactgtagcaatcttttaaatatgtctgctggtgtctagtatattgattcacactgagggtttctgtattcattggaatcaggcaaattacaacacagtacttattatataaataacatctctaatggatatgagatagcataacattttcaataatagctacgtttgtttttgtattcagtttcaagatgatctgctttataataaagattaattttagcaagtaactaccagcttatctaagccaaatagtaaaactgaaaacccttctgtaaatttaagattatccagcatattatttaacttagtgagccttactggttaaaacattatatataggccaatgaaaatgtaatctttcataaaatctgaagtattctattatcttgataagatttttagtggactgtttctttaatcatttaagaattcatatcaccattgtttccacagcgtccgcatgtaaagtgctactctgtttcctgaatgaatgaatgcatgaataaatgatgcatattgaaatctttccctgagtaaagcatgcatttggcaatgtatgtgattaaaagaaatctgacttggttcctctcctagaagaactataatctagtttttaaggagtcaaataaaaggaaatgacctttatttgagaattaaaatgttggaaaaaacttgattggtcatttaggagttcattgtttctcaacctaattatattttggctcagtatactcttaactgtttttaggataattaaaaggaactcctaagagagctaggatgctgttggaggagtaagtatgcatgaaacaatcataatttaactaatttgcccacaaatgttagcaggaaaatataccaaaaattagattttgttttccattcgttatttttcttaatttctaacataatttttaaacaaaactgagagatgtttgtcaaaacacctcccaagtgatgatttccattagaatatgaactagacacttttcctccagtgggataagagccagattttcctaatcacaaaaattagggcatggtcaggcaaaggagtttacatgaaaagttttgcaaaattagtattactttgaaaatttcaggctatttggccactgcaaccagggagtcacttaattcttggcataaactccagcacttttggaaattgacctaactctataaggcaaaaaaaaaaaaaaaaaaaaaaaggccatatagtgccctaaagtggcaaaatttttgttaaaaacagcatccacaagtactgttaccagtttctcaggatagctgtgacaaattattacaacctagtggcttaaagcaagagaaatttattctgttatagcttgggagtccagaaatccaaaatcgaggtgttggctgggttggtcccttctggaggctgtgaggaaggatgcatctggtgcctcctccagctccgggggttgcctgcaagccctgtgttccttggcttggacagtagtcctctcttatccgcgattccactttccatggtttctggcagtttcatctgctgtctgaagatattagatggccatttctagaaataaatgaatcatacgtcttaaattgttcaccatgctaagtagcatgatgaagtcttgtaccatcctgccctgctccacccaggacatgaattccccttttgtccaccgtatccatgctacagatgctacctgcctgttagtcaccgagtagccctcttggttatgggatcgactgtcacggtatcacagtgcttatgtgtaggtagcccttcttttattcagtagtagccccaaggcacaagaggactgatcctggcaattccgggtatgttaaagagaagccgtaaagtgctttctttcagtgaaaaggtgaaagttctgtacttacaaggaaaaagatcatatgctgtggttgctaagatgtacagtaagaatgaatcttctgtctttgaagtttgaagaaataaaaagaaatctgtgcttgttttgccgttgcacctcaaactgcaaaactgatgaccacagtggatagtaagtgcttagttaagatggaaaaggtattgcatttgtggatggaacagaaagtgttccagttaatggcagttgggttcagtcctgtctgaggtttcagacatcccctgggggtcttgtagtgtgtcccccgtggataaggggagactgctgtagatgcatcccttccgtctctgcttttgtcatcccacgaccttcttctttatgtttctgtgtgtcctgctcagcctcttatgaggatgctctcactggatttagaacctaccctaatctatgatctcattttaatcattaattacatctgcaaagatcctacttctaaataaggtcatattctgaggttccaggtggacgtgaattgtggggagacactacttagccagctacaggtgggaaggagaccaggcaggtctcaagggtggcagcttcaccaacaaacaacggttgcccattggaagagccaggctccattcactgatatctcccaacagaccaggtcctgatggcaagattgttacactcatacttaagtataaatcatttatgtgcaaacaacattttgaaagtgccaatgcaattagttttgttgatgaaaaaataaaactttatagcatggatattaaccattatattgttaaatccagcataatagtcaaaataaaatcactgtaaggcaaagtgtttactctgcaaccatttcagtttcacaagatactgagtatgatgttgtggttttccttatctcatcattttacttggtaagtgtcgagacatgcaaaagcttagggcagcccacacagttcgtcagaagcacacgtggggagtttgttacttaggcagccagtcacccccattctatgtgtcaagcctggactaatggatgacagtggtgattacatcctatgaaaaatgattcatgtggctgtcttcaggaaagtcttcacgttgcacctacacagtcctaagactgaactcataaaacggcatcctatactaatattattgtcaaacactatgatttctttttgtcttctgtctttgatatctgcacctaaatattcaggtgttactcattcttatgaaatgggtcagattccaaataaaaattgaagttcctcttatcactgaccatgagggctctgcaagattgtcttgggaaagaagatttacattaggagctaggtcatggattcttgtcatgtctgtgtgtgcccttgtctacgtccaatgcacacaggatgaaaaactggtcagctcacgtgcccatagcccatcttcacctcacctcaagctaagacaccaagaaactcccagtgttcctgggagaaccaggccagtggaatcctgggcttgcatctaatttggctgcaaaaatggagatggtgcatatccctgcaatgtgagagtcagtcccacttgctctattttcacagttccttctctgtacagtaaggattttcttagtcttacaaaggcaggaaaaggaacagttaagcatgtaaatgcaaaccatgaaaacaagacctgttgccaggatatcttgtcccagggtacagtagtacttcccatgtaacacacatcctctaccatgccactctccaaaactgttattggggccggtctggagtccagcatgagtgagatatgtcatccttataagtgagataggctcagcctcgttgtgtgcaaacacgtctctgaggcctggagtattatgacttacctactggaaaaagagaaactgggttcaagggagagataagatcgaatgttaggatggactattttgatagctatctcaggtcatcatgaagattgcactaaaaccttggggagataaatttgtttaggacatgctaaatatatgttttccttttttctttctatttaaaaaaatctgagttgcagtcacattaacaggtcagtaacatagaggtttggttccctcatatgactttctgcatgtactttacatttttttcttgtttaaatgctaggcatattgtgtaccccacattggtttgtagccagctctatgtcatagggcccttaccctttacctatttattgttagtatcatgtccataaacaagccaatggctcagcatgaactgatgctaaagaaagctcatgcctgagtgataaattaagtgacctcagctatttctcttcagtgttgtgaaagttatttttaacagtaggtttcctggtagattctctaaccactcggtatttcacatggcccaacttggttaactcgactggttacggcaaatgctgataaaggcaagatcacaggtttgctccccatgaaaaccaataacttctcggagattaaaaaaaaaatctcccttctgtgaccacaagcagcatcactcatgcaaatgtcggaagagaggaattgggagtgagtgagagtctagcccagtgcaaatatttctactgttgaaaaaagaagtccaggcgcagtgactcacgcctgtcatcccaacattttgggaggccaaggtgggtggatcgcttgagcgagaccaacctagccaacatggtgaaaccttgtctctacaaaaaacagaaaaattagtggggcatggtggccttcgcctgcggtcccagctacttgggaggtggaggtaggaggattacctgagcctggggaggtcaaggttgcagtgagccatgagcgcaccagtgcaatccagcctgggcgacagagtgagactctgtctcaaaaaaaaaaaaaaaaaaaaaaaggaaagaaagaaaagaaaaaagaatctctcaagcatcaagttgtgttcctataggacacatgggtttctgcatgaaagcaactatgtccagtcccctaaacctggtgattttattggaaatacctccagttaatttttacgctaataacctcagcccactcacaccaaggccaaaagttaccagagttatgaacagagccattgcccaccttttccccctaaacgttgttgttggtgcacatctgcagaaagaggccgtttacgtggaatttcaaatctggttgtttagtctacaaggaggggggaaggattctgtctctttaatgtttataacggttggacagagcttgtcgggtgaaggttaattgctctccagtttaagcagttctgtgcccagatgggttatcagggctgaacactcgttacaagactaatctcatttccgacaagacttccctttccttcaactgatttttgcatggccattggagccgtcatcagccgttaagaggagggtggattactctgggatattaatgctggtatgtggtgaaacaatgcggagtggtgttgtatctcagggaacatctttaggagaacatgtttcgctggtgttacgaagagccaggctcctaaacctaaacgtggagacaatgggacccctgaagcgaggcacttggtgaaaggtgtaggggcgattgcagcccgcctctctctgaggaggaccctgccctgataatacacagcgacacttagggctttgtttgcttttgaagatttttttttttaacgtactacgttcagattttcattcctaaggactacacctaagcagcgaggagttctgtttgctgctgccacacggagccctgtggcagggagcacctgtgatgcagcaacttcatttaattcctgtgaaacgtcaggcttctctttaatttcagagatttcatagatgtcatcatgacatatttgcctgaaaatagtaggcagatttttaaaaatttaataacaagtagcttcctttctttagtttgtctcaaaaaattcttccaagaaatggcagaaaggcaatgtctttttatccctttgggatttggtgtgtggaaattgactcattcatttactcactaaggatttactgggcacccactaggctcatgggtgctgaggggcatgagcagcaggacagctgggctcactcagtgctgtcaatcagggggatgcagatgggggagactgacaaatagatcacagctcaacgaagacagagtgtggcaggaagtcaggagccttaggagggaaggtagggaacatgatagagccaggtggccggggggcgggacctctagtttagagaacatgatcaggcaaggcctgtcagacagagacccaaagaaaaggtgagaacaaggtttgcaaatgcctcggaggagtgatgcggaccaggggaatggcaaaggcaaggaccccaaggcggggacaggcagagggtgtctgagagcagcacatcctcttataatctagtttcacagaggaggctgtcagaagaacagccctaccctaaggaagggtccatctgctttgattgtaatcgggcacagtcctggacaccgagtccctttctgtcaggtgcgaaaagcttggggaatgcatcttggtcatgggttgctactaaaatgagcgtgtcatcttcaggggacaggaattaaaggcacagagaaaaactgaaattatttagcttcccttcccttctcccttcttcccatctcccatcccttgccactgattatggtggggctggctttatatattctctagtttctcatatgttgacttatttttgcagtcgtttcagttctaggccatttggtgcattatgttccgcgtttatgggcatgcgctttggaaccaggcagctggcttagaattctggtgcattaactggcaagatgctctaggcaacttatttaatttttggagtctcagttttcctcatctttaaaatgggcataatggtagctagtgtgcaggttagatgcattaattcacatgtgcatgtcttttagagccgccacgctgtgatcacgttattaaatgttagatgttatcaggaaggtcctatattgtctacgatgcttcactttctttgattcatctgtttcactgagaaaagtgagataaattatcattaatctagagacatttttgtaggctaaaggcttcttatcacaacgttttctccaaaaaataacgaacagacaaaaaaaaaaaaatggagccaagtctttcaccgtatttgtttgtttatacaagggctatatagtcaccaccttccatacaggtaggagtctcatgactttttggtgaccctttcagagcaagggttatttctgccccacaggcatcatttgacttagtgagattttcaacacaccctcaaagcacatgttttttagggcaaagagttgaggagaagagaggcagggtgaaagtctgagcctttggtgcagcacctctgctggcttctgagactctgtgtcacccaggggtgggaggacagttctctccagggcactcatcaggaccctgctgcctgtggtcatgagacaaggagatcatgtgtcacaaaggcactcaacatgcagaggcggtgtcgcctgtcacctggaggggctgcacgcaatgaacttccagtctccatgtgacctcccacttcttggctttcctactgaggaatttgccatttcctgtcgagaagtccagggtatacaggagcagtaaatgccgtggagagggtgggggcgggagaaccacaggaagtcctcagatatgaccatttgggttggtggagtcgggaccaacaatgggttttacctctcacagttaaactccattgatgatgcacagttgacaagaattgcccctccaagatctcattgctgtttctgggaagtaaacgctccttaaaagatttacttgtgagtaaacttctaaccactcttctttagctgtctaaggaaaaaaaagtcagttggctcatgttttccaacttacttcctattatatacacacatacatatacacacacatacacacatatacaacacttacacacacatacgctcacacatacacatgcatacatacgcaaacatgtacacatacacatgcatacgtacgcaaacatgtacacatacacacacacacacatatatatatttatgcctgtttagatccaaaatcacacactttatatagataaaacttaagtgaactttaatatctgtaccatacatttaacttcatttcacaaaatagtaatatgtccaaaccacgtctttcaaaaaaaattttccctctctcaattattttctctgagattacaaaggatatcttctcctaggatttgtaaatgcatcttaatttttgatgctcccagatttgagtcaatttcccctacgtgaagtgaggattaagtttgaatcattattatttcaccactctctggtatctaaaataattatttttttcttatttaaaattgtctttaaaaaacagctttgtatatatatatatatgtatatatataattgaatgcaaggtcatattaagatttaaaaccatgggctcagtttctgaaagagcaatgaaaagctggacaagataaaggaaagaattcactaaagacagaggatcccacggaagcttcgcctgcctaggcagagtgtgggtaatatccagatgaggctgaagtgatgtgagtcaaatttgggaatttatttgacctggctgagctcctgtgcccttttgacgtgtctctaagccttttttttttttttttttttgagcgcatcctccatttcattttgaagtatgtatttgtagacggttttatgctgtgaaaatgaaaacttgctacacctcagaactacgtctcagaaggcagcggactggtcttgcaggtcccggaagttctgccccgcagtgcctgctgcctgcctcatgccgggtctgcaggcggggagccgaggtcagccgaggagccaagctcaagggccgagatgggctgcaaaactcatttcctccaggccctgctggggctccttgaaatggaaaaataaaaaagtcaggcccagcatgcaccaagacagggcagacaaacgacaagactgcaggtctgagctccaagcgcacgaattgcccacgtgcagccattttctgctttgagcgtcatggaaaagagaaacttagtagctgagacacgtttcttccccttctcctgtgatttgggaatgcccttttccaaacgttcattttcttttttctccctcctgactctcagggcttcatgttccttatcgtagagtgtagctgccctgtggaggcctgcgcaatgtgatgagctcagcgggggtaaccaatattgccacctcacgtgggagcctcaccactcttaggacgtgttttcaggggagagttagagttttagaagttacaaataccacactcgcaagcaaactttggggacacaacctctgtctttatctctaaactggtgatcctaaaatatgtcccgtatactatgtggagtggcatggaggagcaaatgagacggtaattgaagggtgtttattaaattataaagtgcccagcgtataatcccgtcattgactttacataatggctagtgtaacacccattgcatagagtgctggcatgcagtattttctatgagtgacttaaggtggcatacaataatagtgcaccgtttcatgccttccttccttccttcctttctttcattctttctttctttctttctacaatgattttacatctggtatgtgccaggagttgttctaggttctgggaaaacagtctctgccctcctgggttttacattctggtgtatcttttgtttcaggtaatactcaaatcaacaaatgcccgcattcaggctcatcatacacgctatacgatcaaatgaagcagcatatggaatagagatcaacaggggagggggaagcttttggagggaggatccagtgatctcataaagatcttgtctgagcctgttagttctgaggtgtgttttggacattgaaaaacctgaaagtaattaaccttcccaatctaaaccgtattttccacaaataggtttgttggatactagtattttcacgtgtaattagaaaaggaattactttccattattaacaaatagatgtgactttgactcatgttcattttttttggccacaaattctcagacttttgatcttaatggtcaagtgcaggtaagaggaaatgaaacaaaattaagcaatgatttgaatacattttctcccttgtagaagactaattatagtttggtcattgagtaattttctcagctgcttaggatctttaattaggtttgatattcactatgaatgtgtggcagggtttcttgggaaagtagagacgggataaaacataaatgatttatgtaactggatatgtcccagagtgaatgagactttggtctcaagaactgttccagtggtttgtcgttctttgatgagctccgtaagtgttgctcttctcaacagaaggttgaattttaggtgaacagcctttcctgattgtgtagatctggaccacagtttgaaggtgcccctccctctccctctgattgccagagaacccctgcattatcacagcaacccaagtcaccccacgtattcccaaacacccatctgctcaggacagaagaggcattgcctctagttgagaaccaagaagtggtcatttccttaaaagctttgtcttgtcttattttaatatttaaatcaaatgacagaactgtttatctatttttatcactaaactccatagtccaattttcgtcttcatacaaattaacatgtttttacaaaatctctaatcttatgcactgctcactggcaacctctgtggtgaactaaaccgtaatgaataataggccagagagccaatgcagcctaggttgcctagaggacagagaaacccagtggcaatttctgcagctttgccaacagccctgagtcacctcgaccctcccctggctcctggtccagtctgatgaaacagtttacaagatgtcttccaggttagcttttcttgttagtatctgctttcaactcaaaatgcacacactcaattaaatcttctacttctgtatgacaatgttaatagactcttggaaaaaataaatgaaacagaatttaatggtgccaaagttgattatacttttagttttccatggtcggaaagctgggtcaattttatttggttcctggtccaggacttcgcctgtgaagcagtttgacaaatgtaattataaaatgtaaatatggaagaaaagagataccagtgcagagtgaactagactttactcatttctgtggcccctctgctatccactgtgtagatggtcaatatgtatttggtaaggtaaatgcaattatgacagaaaaagcagcacatggaatctttacaagtaaataatttttactagcttaacagaagtattttgaaaagagaaaaatcttacgacttagcttggcagattagacaaagctaggatcagcatataagatccctgatattcctttctttctgccgtttattcatcaccttcccccaaatgagttaggtcatctttttgaactttaattcaattaactccagataattataacaataataataataataataataatagaaaacactcatagagtgcttattatatgctagacattgtattaagtgttttgcttaatacaattgggacagagaagacaggttcctgcaatcattatagccatttcacagatgaggaaactgaaggacacagaggttaagtaactagatgtgtatccattcagcagctgtgcagtgggttccggagatacagaaatgaatcagatacatccctgccctccaggagcttacagtttaatggcctgaggtagatgcataaaccataggagtacatagctgcatatacaaactgcagacatctgtttgcaatatagattatacaattaagaagacaaattgctggggaaatcgttgtaataaatatggcaagtgttaatacccataatttatgcagatcatgttacaactgaatgagatcacatgtgtaaacatattctgtgagctgtaaacaggagggaatgtaaaaggttataatgactactccaacacagctttattaacatagacaataaacctgtgaatttgttacttttccaagtaacagcaagacttgtttaagagctgcctagaagttctgggttttttgtttttttacttctccatgtatttgatagtaaaaaatgaaagataatttattatatcataaaatgtgtttgttacaaattaatattgcctgaaaggaaagaaggagaatagcccaaagcagttaatacaatgattccgcaggaatcaaggtgcagctaattatatttatatgtactcatcgatttttctaagaaagtaggatattccaaagcactagagcccagcccatgtgatggtgttcgtgagcatttgtggcagagtttctgtgaagtttgcatccaaacagatgggaatttttcaggtaatggcatacaagtaacaggtaggtagactactcatgtcttgtaagaggcgtttaaattttatcacggggagagatagactagtcagtcactcagtgtttgctaagtgcgttaatgagtcacagatggatagacatggcattaaaaacaagcatgcccagagttctgaggatgaggctggactttagcataagttgcttggattctctgactgaaaccattcttcttagaagcccttctataatgtaaatagataaggggacccccagtggcatgtcaaggccatcaggggtctcgggggctatggtttttttttggacaaagggctagagttctggtcttgaagccacattttcttttttttttttctttttttttttttttttttgagacagagtctggctgtctcccaggctggagtgcagtggcgcgatcttggttcactgcaagctccgcctcccgggttcacgctattctcctacctcagcctccctagtagctgggactacaggcgcccaccaccacgcccggctaattttttgtatttttagtggagacagggtttcaccgtgttagccaagatagtctcgatctcctgacctcgtgatccgcctgcctcggcctcccaaagtgctgggattacaggcgtgagccaccgcacccggcagaagccacattttcatagtgagcatggtcttttcaccgacatggcaggtttgttggggtggcttgatgaggtatatggtgaaggctcccctggcattccagttgccagaggggactttagaatgttcaattctttcctctgctgtcacatgggttttagcatcatcaactgtggtgaatggagcatccagatcttccaattcatcccatgattcttgtcaaggaaaaaaatctttaggatttgaggccagcactatgggaaatttgaaaagctttgctcctttcaagtttaatttttgctttcagaaaacaaataagtttacagtatgcattccatgtgaactccaatttccctctctatattcagagaaatacatatctattttctattgcacagagctacggaatagtttaccaggcctggtagcagcccaacaggagagagaaaggagtgagacaggctgtggcagctgggagataagtgcaattgatgagctgacctgccgggtggggaggaaggtgccgacctataggaaccacagtctcattccacctaagggctttctctggctctccaccacagccctttcacttgaagcactaacacgtcaccttgtggactaagaggagttttcaccttttctccttttctgcacccagcttcaatcattggttgatgaccagtgaaatgttttaagaaggcaggaagctggagggagaaagacaaaggcttacatatctcccagaatgggtaacaggctacagcatgcatggccatgagttggatgtgcacatgacctgtgtacataaatgacaccctcatgcacacatgccgtaagtgtgcatatacattttgttaggtcaatttctacatcatattccagaaagtcacataatcagttttcttttttggtattcacaattcacttggaattcaccaatttattatgtgacttgaatatgtatggcctttctgctgagtggatcctgaaatacaaatacttactgttactggaagccccaaagtcaagatgcaaattaatagatttctatatggcctcagatctgagtcctctgaaactggcgatttaacaagagcacatgtacagttacagaacctccgcgggtgtgtctttcagggttcctgtttcttatttccatgtctctgtacccaacacacttcctcctgacccttctttctctcctcctcctccacacccgcagaagcacctagccccaccacacataacttgctagtataatgcatttgttcttggaaaatgtgtgtttttgcacactttggtttccacctgcttttttgggaagatgtactatatgatgcataaaagatccggagctagctaggaggagggaggtttgtttgaggcaacagtgcaagaatatcaggtcattctttcaattgcacacttcagagtatggatacttcccttgaaacatttgcagcacaagacttttgcattgacaagcctcttgcttttgaatttgagctgtcaaatgttgtttctgctttcatttgttggatgtttctgcttgaactacaaggtaggacctcatatagataaaaaaccaagtctttaacccatgacttgagggccgagattggattctgattctcagcacatccaaacatgtcttgaatttgtagccactccttgccaaattaactacctctgtgactttaagagtagctaataagagtaacaagctctagtccctctttgcaggatgtaagggtttctaggggccagaacatgttgggcttcttacgccaggtgaaagatgttggatttcattttggggaaaagtgtaacatggtaggattatcattccagtagagaaaccctgtttttcagtttgtatatgacctcacatgacttcacagtttggggctcccaccctgttgtaagttgtccacatttggaagaaactgtagttccaaccaactgaatcaattatctgtaaagttggttcatgcaaatcagtgcatacatgagactgtgcctgtttggtttgtcataactattttatcatatgaagaactgaccatccataagaataatttcccagacctgtcattctttaaattccttttatttttgcttccaacatagaccccccctcactttgggagtatatcttccaggatcatgagcccacgagaggccatcttagtacactgtgtaggaattaaaccactcctgcaaatgtgaaacaaactgtacttttcaattaattaaaatcatattccagtgtgcctacctaaataagagtgatattgttttgagcaagatgagatgatttatatatatataaatcatatatacatcatatatatcatacatatctatatcacacacacacacacacacacacacacacacaccccagaccatcagacagcctaaactgttttaatgtatggaccattattgtagtgatggattttcttcttggttctagtttcattcatacaagaatgctgatacatggacaacaacaagacaagaatataactatttgcagcctattatgtattatttcaatataacattaaagtctctagtactggggacaaatttaaacgtagctttaaaattatataaataataatgagcatttatcactagtccccagaaatacaaagtctagcactcatctctccaacaccgtgctaactgcagacagtttcacacccagcatcagaatcccacaggagtccttagctcctccccattccagcccaggcacctcctctgaaaggcacaaggcggtcagggagggccatctcatctccttatttcaatctctagttttgatggggatgggatcaaggaggatgagatattcacagtgacatattcagtatcggagaaccaaagtaaagtggttagggccgtcattgcacgtgtggcaaaacttataaattaattggaatacttcattttttaaaaaatagactttatttctcagagcaattttagtacgcagcaaacccgagaggaagatagagtgatttccatacacctgctgcccctacacttgcgtagccttgcccacattatcaacattccccatcggagtgcatttgctacagttgatgaacctatattgacaggtcattatcacccagtgcctgtagtttacattagcgttcatttgtggtgctggacattctgtgggtttggacaaatgtatatttacatgtatccaacattataggattatacggaatagtttcactgccctaaaaaccctcagtgctccacctgttcacccctccctccctctaatctttggcaaacactgatctttcagtatctctgtagtcttgccttttccagaatgtcatataattggaatcatataatatgtagtcttttcagatcggcttttctcttgggatgcttaatttttcaaaaagtctctgtgcccatctcttttcatggggaacttgattggcacatttaaagtacaattcaactaacaaaaacctacttacatagaacacttcagaaacacaattacagacagcagggtacacttgtaacatcccacaggcaaaaacaggacaaattatttggagtctagcctcttacagaggaagaatccatgttgcactggggcttgcattccttggaggtggagaagatcattcctaggactagggagcaaattgagattttaaaacatgaacccagaaccaactcaaatgctcatcaacaatagactggataaagaaaatgtggcacatatacaccatggaataccatgcagccataaaaaaggatgagttcatgtcctttgcagggacatggatgatgctggaaaccatcattctcagcaaactaacacaggaacagaaaaccaaacaccacatgttctcactaataagtgggagatgatcaagagaatacatggacacaaggaggggaacatcacacaccagggcctctcggggggtaggagggtaggtgagggatagcattaggagaaatacctaatgtagatgatgggttgatgggtgcagcaaactaccatggcacgtatataactatgtaacaaacctgcatgttctgcacatgtaccccagaacttaaagtatatgaaaaatagcattatctaaaaatgaacatatcctgtagaataaaggcaacttcaaagaattcgtcgatatgataggttagcagttggaatttagacaataaaataaatgcagttaattatgaattgtattaatgaaatgaaattgctttccacagtgtgtctgatgttttaggacttcttgtccacaaatagtttgaagcactgctgttactctctgggtactaggcagaaaagcctttgggactacggatggatgtgtgaggcttttatttctgggctttggaagtaagaaatatgacctattccccaggaaaaacacggaaaccagaaggcatggtaattcagggttcaaccacaagaaaacaaaaagttcagttacacataattacacttttctaagatagaatccaatagtaacatattaacaaatagttgtttaatatttaatttggtttgccaagggaattcttaataagttctgaattatttcataaaaaaaaaacatgaacccatccccagtgctcatcctagtgttcggagtttttaccatttctgaatcacaccttggaatcaatggagaaaatcctgctttgatgcacccttgctgcttagacgacaggacttcttaacccatgaccccagtagcatcatagataaaaagggtgtgtgaaaaaggagtgaggggatacgggaagtgggaatacaaagcctggattacgtgcagactgaaagtcaaactctggacggggcatcccaggcctgtggaaaccagaaccaggctatggatccaatgggaatttcctcagtttcagcttccccccaaccagcacacataccctgggccctccccagctcacgaggggtggccccacttctatgcttttccttgcagtttctccatctggaaatgctccccaccattttgatttacccagtacaccccattcttcaaggctcaggccagtgcacaccagttcctttaatccctccttccttcttctgtcatccagtcgacacacttagcatgacatttggcacctgcataccaggagctcatgcaacaaatacgcactgcatgtgcatgatatgtggacacttacaggctctgaaaaagagaaaaaatagaaaaaagtctctgccctcatggagccagtattcccccagccctgacgaatctcctgctcctttctcccagtgtatttcttcccctctgttaaagtagttcctagagtcaaccacatgcagaatgagccttcaccaccatcaggctcctgctctgcacatgatggatgcccagccacttgatcttagtattaaatgcctttgagactctgttttataataaaatgagacacccaagcacagaccccagcaagcaggtaaacagggaggacctttcagtgtccaagtatgggatacacatttaaaaattaaaataatctggttatatttaaaacaagtggcccttaacattaattggggagtgccacttgccaatccagagatgcaccaggtgtaccaagatggacacactgggagataggcagggagtctgtgcccgggctctgcagtccctcagccccagggaccagtgtctcaagctgcctctgatccagaaaagcacagttagcttggcaacaggttggtggtatgcagttgctgctcatttcctggtccgctttacaggcctgccccttgattttgccataagacaggccacttgcaagaaggttcatctagaagcagatgtgtgctgtgtagctgatgggtgggggtcatgatgggcagcctgcttctttagtagactgtgtgcagtgttagagagccctggggcagcactcgtcagttaggatgcacaaaaatgccaacccccgactctcagttttttaagttgcataaattccaaatttaacatatcaccatgtgcagtcttggaaggctcaatattggctttaaaaaattattttcctaaggactctctgttgtcaacttgaggaaatggctaacaagcttccttttctatgacacttagctactgaaaatatgttcttcataaagtgtcttattactgtcatactgtgggttacttcagtaagtacagactgtgtcctagccaagcttaaaacctcgacggcagtgattcttaatcttttggtctcaggacccctttacgttcttaagattggttgaggattcttaaaaaaaaattgtgtatatgcattatatctattggtagaaacaaaaacagaaattttgaaacatttacttataaattcatttaaaaataacaataacaaggccaggtgcagtggctcatgactgtaatcccagcactttgggaggccaaagcaggcagatcacctgaggtcaggagttcaagaccagcctagccaatatcatgaaaccctgtttctactaaaaatacaaaaaaattagccaggcgtggtggcgggtacctgtagtcccagctactcaggaggctgaggcaggagaaggcatgaacccaggaggcagagtttgcagtgagccaagatcgcgccactgcattccagcctgggcaacagggcgagactccgtctcaaaaaagaaaaagaaaaagaaaaaaaaattagccaggcatggtgggacacgcctgtaatcccagctattcaggaggctgaggcaggagaatcacttgaacccaggaggcggaggttgcagtgagccgagatcacaccattgcattccagcctgggtgacaagagtgaaacttcatctcaaaaaataaaaataaataaataaactcattgcatgttaacacaaatgagatatttttatgaaaagtaactctattttccaagaaaatgttaatgagaagtggcattgttttgcattttttgcaatctctttaatgtctgggctaattggaggcagctggattctcagatctgcttatgcctgcccttagaggggtctggggaccccagggggttcctggacaacactttgagaatgactgacctacagagctccggagaatcactgacctacagagcatagtgtggtacctggcactgtgctaggcagggagatacagcagtgaagaagagggacacattctctgccttcctggaggatggtatgggttgaatagtgttccctgagttatgttgaagtcctaacccccaggacctcagagtgggaccttatttggaggtagggcctttacagaggtaatccaattaaaatgaggcccttagggtggtccttaattcagtgggactgatgtccttataaaaagaggtaatttggactcagaaacaggcatgcatagagggaggatgatatgaagagacagggagaagatgaccatccacaagctaaggagggagtcctcaggaggaatcaaccccgctgctactttgctctctgacttccagcttccagagccatgagagaataaatgtctgttgcttaagcccctcagtccgtggtacattgtcttggcaaccctagcaaatgaatacacagactatgtatcgaatattgaaattgggttttaaggcagtaataaggcccatgctgcttccttgaggaaaattcagccgcaaaagaggattcactgcttattaatatggagacacgttctaccagatagagctctgggaatccaggttctccataggcaagcacagcagtgaacagtttttccaaacgtctccttcctaagcagaaaggaagtgacaccattgtctgccatttgccattcagagctcgttaaaacctacagcctcacacccatcaccggtccacaggtaaacagagatttcagggcaggggaatactttggtgccgttattcctttcagttgccacaagtcagtttccctaaaggctgccctattagtggatgggtgggtgggagcctcagtgaggtatttcctgtgtgagtcaaagcctttcaaaatggccgtgaccccttgcagactctgaatgaaaagtacagattctcagttcccagagtttctgcatgtgatgatgaatggaagttcccgttgcatgtgggacaaaggatggctgtaacattttattaggtgtggcttttggtgtacacatggcatatgcaatatatgcattctcatcacatttagttttgaaaataataaaactttaaagatagaaagaattttctttgcagaacccttatgagatggaaaatattagtgcaacacagaagaagacaattcccgggcttttagccaagacggctagagagactccacttctctctgagtcaacacccaggttcctgccatggcctgcaaggctctaccacccccagcctttcctggttcacctcctggttctttctttcgctcctttccagtaacccctcctccctggctgttcttggtcccattgttcctcgtgcagcccccgcagtccactctggccttgttctagctgttgccaaggctggaaggcctattcttcatgaatgcatgggggctcacaccctcccctccttcgcgttttctcaggaccaccctggccactctaaatgaaaagcagcagtttacctctcttttcctgagtctctagttctgccttctgtttcttcatacttatcacttaccaccttctaaccctgagatcaggcttgaaaaacaaggttataaatttaccctatcaattattggttgattaattgattttcaaaaattatctgtggcttgtagtgctagaatacaagccttatgcagataggtgtctttgtggttttgggtcatggatgtaatctagaagcagctagacaagtttctaagtagaaaaggtgttcagtacatatttgttgaacttatgactaagagaatattcttattcctggaagatatgtgtgatttctagtggagactagaaatggcctttctctgaggcaaacttctaaatcctctgaataaaggtatctctagcccatctgactcagtcccacacccctgggctgtggaataaccagtttagggggtgattaaaatggctacataggtacagaaatgttaacttcaggttgtcagtgtagcagaagcaaagatgtttgtcgtgttgtctgtgaagacgtgctataaaatcgtcccccaaagtaaattgtaatggcaaccatgccctcagattgttctggaggatatagacagggaatcagacactactttcaaaactgttacataataaatcttacattggaaaactgtcttagacctgtttagaaatcttgcattctctgtcttagaactttccctcttgagctgataattatcatccagtaatgacacttatgtggccttgggaaacaagttattaagcatgcacctgccatccctccaaggcagtttcacccttcaaattaaatgcgctgcgcttcctggcagcgctgaggccattggagtggctcctgagtgatggcttggaagaaatgatagcctagtagagaagtggcccaggagagtgcacagaggaaagctgacatttagagaatgaggagagaaaaaggagggcataaagagatgggggatggaattgtcaaccaaataggaggaatagcaggaatatggaagccaaagaaaagagggttaaaaaaggggagagtggccaacagtatgaactgctcttgagtaggtaacaaagagaccagctgggagtgaatgtttgagggaaccccaaaaagctcactcctaatcgtggcaggacagtgtcagaaccagacggcaaggttggagaagagaagagagcaggagatgagaatctgttaaagagctgtgaaatatttaagtaagtaagtatggccaatttttggttccttgcatcaccagctaccacccccaccttcggacacccagaccaacacacgactcttgcttgaaagcaaagtatgaaggttagagacactgacgtgagtgaaactagactgaacgtttgcgagatcctggataaataaatattggatatttttgttggataaatattgcttggataaatattgcgaaagtgcattgtgattgcagaaatactgaattggcatcagattcattaataaaaattctgcctgacatctcacgtgtcaaggcccatgggagcctgactggccactacttggtgcattcttttttttttttttttttttgagccagagtctcactctgtcacccaggctggagtgcagtggcgcaacctcagctcactgcaacctccacctcccaggttcaagctattctccagcctcggcctaccgagtagctgggattacaggcacacgccaccacacctggctaatatttgtatttttagtagagacagagtttcaccatgttggccaggctggtctcgaactcctgacctcgtgatctgcccgtcttggcctccaaaagtgctgggattacaggcacgagccaccatgcctggccagtgtgctcttttacagggcccagggagctcagtgctccagtcggctggttttccagttcaggagcttaaggcttcagattcagcagtggcagaagtggtttcccaacttccagctgccctgttctttgcacttttttttatttttaagtcaatctaaaatgagtctgtgttcacaaataaatagcgacaagtgcaagtctgctagagtggaagagagcaagtgcaaattctctttccctttagctaagttgctctttgaagtaggcgtagccccatgacgctcccataaggcttactgtgcaggttggatgagtaggcaacttggaaggccccacctgctctgcaaggaggtagtcctgcacagcgcctggtggtcagatgtccactactcacctacccgcccaccccacaggtggctctgtgctgctcagaacctgcacagtggtgcatagcatttcccagctcttgaagcttccttttcttcctgggaaagatagatgtgaacatccatgacctcacttcctccacaaggatgaatcttaataagtaaagaggtccagtaaggaggcaatctaaagaccgaggtttagactctgtgtacacgtcaagatttcaagtcaccaggctgttgggcaggccttgatggtttggatatgaatgactctgcacactttcaaagagtatttgtgacttttttttttttttttgagacagagtcttgctctttcgcccaggccagagtgcagtggcatgatctcggctcactgcaacctctgtcccccaggttcaagcgattctcctgcctcagcctcctgagtagctgggactacaggcatgtgccaccacgcccagctaattttttgtatttttagtagagatggggtttcaccatgttagccaggatgttttccatctcctgacctcgtggtctgcctgcctccacctcccaaagtgctgggattacaggtgtgagccaccccgcccaggcttgtgactttcaaagtagacatatttatagaggggctcaagccagatggcaaaagagccctattggatgtgatgtaagtatgtgtagtttgaaattgttggagggattgctctcctagttcaaatgtattaggttttgaggtcagcactcccagagtcataaaaatcaagtctcactggcaaccaacttgttagtgcatgaaaagtgttaccaggacggggtctacccagtgctcatctatgtcataggaaaagcatgagctcagcgtataacattagcaaagggctctgatgacctggctacttagtcccctttccatgcagcaaccaggatatatttatgtgctggaaaaatcttctgaaaagcacaggcttagcatcccagccccagggagtcagacatcatcacttaccaagctgaagaaagaccttggcagggattggaccctcacagtgggtgaagactaactctttctacgtaagtcagcgtctaagaaaaagaaaacgtctgtgttcatgtctgcgttatacagtgtgtggcccatgccaacaatgatggggatggggatagaaagcaaaagaaggagacccctggaccatcatgtgaatagtggagacttattcatgtgctcctctgtctgccagaaccccagtttctacaagactttctgttggtattaccatgttgccatgtgttttttattttttaaatttttttatttattattattattgaagtgctttatgtgtagaacagatgccatattcccatgcaagagagtagatcctttccacacttaaaaacataacactagctctcagggtgctgactagcttcttaccattagcacagaaggagatacctacaagattgaggaaaattaaagtctgggggcagcagggaaagaccctgcagttagcatctaacctggatgcataggaactttttagcaactccatacatggtagatttctaccttatctgcatgtctgctcagagatggaggaggtagagactgcagcctggctatggctgaaagaggatgttactagttaaacaaatcgatctcattttggtgcaaaatggagtcttagaaaacatcagtagaccagaccctcattttagacgaggagcttgaagacttggtacatgaggggcacggagtggtggagccccatggccagtggccctgtggtcttgcggcttcttcttaaagtgcccatcctgcatcctggcacgtgcatgttgaacctggtgtgacacacctgtctgtggggaggggggggaccgtaccaattatttaaaaaattaaggctgttttgacacccccaccccctcacccccgtcttatgggaaattttgaattgagtgtttgaaggcatgagagtgacacctgatgaaaattagctaaaagcagagacagagttgtgggtggaggccaggacatctgctgcccctatcttttgcttgccagggttttccattgtgccagaattttctcatgaataaaattcctggaattttatcgaaaacaatgaatccatgtgtcagagattcacagatgagacacattccagatgcgtagcacactgtatttttagcctttgtgtgttttgaaagggccaagcataaaactgccgatttttcacggagctccttctgaagaggagagaggtggtgcaccaccccttccctggtgttcagagaaggaccatgccaatagaaaaaaagtgcaagcaactttgctactccttgagcttggcctttgtgtttctcaagccttgaatcacctgagtttcaacctgggcttgtaagtttcaaaaatcaccaggacagaatgatggtgtgaacctcttagccagactgccatggaaacacttcctcatagaagtttatgaaaaattcaacaatttttagggaaagttaacatagaaagcattatggattccacatcctggaagaaaagacttttcttcagaagtttgagggctatcaactttgtgccttgtgctattctaggtaaaaaaaaaaaaaaagaaagaaagaaagaaagaaagaaaaagaacattatgttataagaccatggtatatctattaatttattatcttgttatgtagagaataccaacagcacgctggggagtgtaccaggattcattccttcctgcacaaagctttgatttaattgacattaaacaaactaatgtagaatttgaatggaaaacccacaaaagaactggaccagggaccaaaaaggctataaatcaaagtgacagacgtgctcttgaagtaaaagatgctagatctcccttcccctctgttaggtagatacttggtttgaaaatccagtacttacaaaaaataagtgataatttgcacacaagagactgtgattttccttgcatctggcttgttagaataatatgactagaatggataattctgatggttcacatgcagaggtttggagtcagtcacatcacccttctatcatatgataatttaaatacaatattaagatttatgaaacctgttacacacactagattatttggcccatttaactgtcctgggagagagctgctcggcagctggttgccatcagtaccacctttatagttgaagaaattgagagtcaaaaaaggataatgcagcacttgttgaagtgagcaggcacccagctcacctggggaagttgttacaaagcagattctgactcagcagggctggagactcggaatctgcatttctggcaagctctcagctcacacttggggcaggaaagggttaaaggatttacccaggtgattcccagagcaagggcagagcccagcttgaaactcacatcttccatcttcagatccctatccctggctcccgtgctctaccagacggtctcctatccattggtacagcttcatgttcatcctccactgagtgattaaaaaaagcaaagaaaaacttctttttatctcaaatgaattatttaaaactagataaaaaataaggaaaagggttttgatgaatattcgtgagtaacgtataacagtgattagagaaacaaaaacaagtattgagtgtcaagagtagaaacagccctcttagaaggatgtaaaggaatagtgagtgtattttttgcacccattccaatgtaaaacatacaaacaggaggtttccacagatgtttttatactttttgctcatctccaaagaaggaaagaagcctactgggaagaaaaagtgattcttcttcttcttttttttttttttttgatggagtttttctcttgttgcccaggctagagtgccgtggcgcgatctcagctcactgcagcctccccctcccgggttcaagcgattctcttgtctcagcctcctgagtagctgagattgcaggtgcacaccaccacacccagctaactttttgtatttttagtagagacagggtttcatcatgttggccagcctgctctccaactcctgacctcaggtgatccacctgcctcggcctgccaaaatgctgggattactggagtgagccactgcacccagccaaaaaagcgattctttaaagaagaaaataagaagctattcacatcacaggcatgttgtttcttaaacagttaaatggcatttgccagggcaaagagtcccagttcattgtcctttcaaatgcattcgaggtttattctgcatggcactgagaaaacagagttgttttaaaatgatgttggttgacattcttgatctcccaaggctcatttaaatctaattttcattatgtggacataactattctttctttaacatttttctaccatgctccaatctttcacaatatttctagagtttctgctttccagattgaatgctccctccttcttttgcaaacgttcattttccagtaagtcttattttgttcataggttgcttagctataggaagtccctatttaagcctatgtggattgaaggtgaaactctgcaataatacgctctttggtagtatgactgcagacatattgccaatggcaattattttccaaactccctggaactcctgggcgttggctacacaatccattcatctcacaaaaacacgtctcttcatttggatgtaatagaagtttgtggatcccatttatagcattatgatggggctgtaatatcacctgatgtcttagtcctagggctaatatgaacaccaacaagcatttgaggttaagaaattatcttatttctagaggcagacatacagaggagccagccctgaaaatgcttatatttgaataaaggcaaggccaggggagaagtatgtgggcaaagagaattgctggcaccagccaggccttctcagagccctgagaaagtctgtgagtccagagccgggaaaattggctgaaggacatggaggggatggatccccagctaagtctgttctgaagggatgtgctgagcatagggaaaagcaccttctaggatgagagaggaaggagcagaggtgaaatgggaagaagccaggttctctgtatcttttaggcaacatttgccctagtggatatgattaaagataaagaatatctgaaagtcctctaaagcgttctattaataaagataataaggataaagattttcatctctccttattatcttagtatgtatttagtaatatgtatacatatgtatgatatttttgtatatacattatgtattgtatatctgcatgtatttctgtaggtatctatttgcatatatgcatacacttatatatgtatttgtgtatatgcatgtgcgtatctgtatatatgtgtgtgtatgtatatatgtatttgcgcatgtatgtatttgcatgcatgcacacatgtatatgtgtacatatgtaagcatgtgtatgtgtttgtatatctgtatgtgcaaatgtatctggacactagttctgggtctcatttcttagcactggactagtgttgtgagtggtgaaattatttgacactgaagtgataccatattggagaaatactctctttagatggacttcatttgcctacatacatttttcctttgaggttaatccaagattttttttatagttttgaaggactaaaattgcaatgtgttaaattagaaaaacgtgaacacaaagctagatgctgcatttaatatacgatgttaatacttccttctctgaagaattaagaagaaaagaaaatcatatcaagaaggggcaaaaatgatcatacccagctttgtgaagcttctttcacttaccacgtttcgcttttttgtgtgttgtaaataaaagacacactggtcagatgaagattcttgtttaatgagatactggtggcatcagaattgcaaaagtgcacacatttagaataaaaactcctgaaggactggagtatctttgtcaggcttatggtgggagagcagagctttctctaagtgcattgtctattttgtttgtgttgttttttcctcctccaaatacaattagatactagaccttttagaagcatctactgcatatgtgctgccttgaagagaaactataaacaatagagcctgcgacagcctaatagatagatttccaatatccttaggtctgcagacatccactaaaggccgcccaaagtggcataggctccagcatatttataaatggtactcctacctgtcctagttttcctgcatagtactcattaagagaaggcaggcatccacctgcaatgaacacatcccaacacctggccatgtctttgtgtctgaataatctgattaatcaaagaaaagaacaaggttgttgatttaagccattgcaaaagaaatgattaactgtatgcagggcccattgctacacatcccctaggctcatagaagagcatggtatacctagagaagtccttactggttcccagcactctccgtttaccatccagatcctttattccatcccagatccagggattctggacacttatcccttcatctttcttctgtctcttccctctaccagcctctctctctctgtctctctctaggtgattccatctctcatggcaagagcaggcaccaaaacactccaccgtgtgacttttcttaatccaacttcttccttccagtaacagccaggtagtggccagtctacagccttggggaatgattccattcacagacacaaaccctgtttctgcctcatcctcactgttgatgttacttctctaatcgcactttctgatgggtgggcaagaatcacagctgaccttataggacaattgtaaggattaaatgatcatttttcataaaatgtaagatgtcattggatataaaatgtcccattattttatctgccatcagagaagaagaaatgctgcctgatacctaggataagcctttcattttcatatttcagagctgataaaatgtgacaagtggtgtatcttgtaatcaacaaaatagaatttaagaggatattgcatgaaagtgcttaaggtaacctggtttatttggtggataagctatttatgaaagtggttaaaagatggcaatatagggagttaagtgatgtaccaaattctgcgtggttatatgtgagggaaatttaaggaagggttttgtattggattgtaatgggattaaaactgacagaaaaagtaggctattgattgaagatgatgctggcttcctaagtgaatgatctccacactgtgttgtgatagcagcaaggacttctttaagatttttttattttttatttcttattttattttatttttttgagatggagtctcactctgtcacctcggctggagtgcagtcgcgtgatcccggctcactgcaacctccgcttcccgggttcaagcaattctcctgcctcaccctcttgagtagctgggactacaggcgcccaccatcacgcctggctatttttttttctttgttttttttttggatttttgtatggtctcgatctcctgaactcatgacccacccaccttggcctctcaaagtgcttggattacaggggtgagccaccatgcccgaaccaagatttttttttttttaagcatgatcatgatcatacaattcttgttccacttagttgttccatttgtttttcataattatcaaataattatagcatataagacttgaaaacattgaaggtgggtttgataatccaattctcgagaggcctagttctggccatcttcctaatttttgaaaaccacgaaaggaccatggatgcctttgcttactccagatgtgaaattcacctgaccattcttaaagattttctcagtttcaacactttaccactcccaaattttcaaaagaggttaagtatgatggattctctgtattaacaatgtaatatttttatgagctataaggatcacaaattagaatcaattttgggcctttattttctaatactttggttgagaaataggcatcttgcaaagtattcatctgttatagaaaggcatcaggattcctgaaatactttgctgaaaatgtcagtatgcattcaactttgttagttttctttttcagtgttctaatgtattttggatccttttttgtactctagttacttgaaaatagatgcatattttagagttataatatgaaatataacctggtgggacctcccttcatttctggaactgttatcccatgaccaaaatccaaaggaatggtcctcatgtgttattggtatattccgtattgaaatgaaataatcaatactacagtactaacacagtagtaccttttgtttgggggtaatttgcttagaattatgtgtttctcgtaagttatttaaaaatgagcttggtagcctgccatttgcctgatgggaatatcccaactttcctggagctacagaaaaaaacaccccacacattggcaaacaccaatctaaagttcaggtctttttatagtaacatagaagcaggcatatgaaatgattatgccacatatctgccagattttgacgtttaaaatattctctgttataaagccactgaagcagatcccaagccttgtggctggccagagtttctgcaataacaatctatacatgctaactaaggcagctgcctaccttggccggcaggtaggcaggcaggtaagtaggtaggtgagatctgctagttataaagaggaggagccaggctgcagggaaggagagacatgtcagtcaaggccaggaagtctctcccagagctggagttaaagaactcatgtggtcctgattagcagcctgtgttcagcactctttttctggttttaatcctactgggctagatcctctctcccctttgaagtcacagggctgccaggcagggagggccctatgcagcagcgtgtgtccattcaagctttaaccgaagggatgatgaaacctgccaacagccaagtcaagtgggaggacaaagatgtggcagggctgtgccttggtttgcttctgaagagcagcacttaactttagtgaccgctgttgtgggaatgggtctgtgaaaacccctcagcttcttcttactcccaaaatgtgtatgtgagagagattttctttattcatttgtttccttttcctgagctgtacttcatcctaggtgttcagcagcctttgttgagtgacaatcaacaaagtctttggggcatagtttgggttgctctgtcttttcaaaatgtggactgtatttcacctcttttgaagtgtttatcctgaagcttccttattttcagaatttttcccttctaatgaacaaaagcaactgaggggttgctttcaatattctgaattatattcccttcctcatttttgtgcaatattagctgtgagaagaattttaagatgcaaaaaaaggaggcatgcctcccccatctctagcatttctgagggttttttccttcctaaatcgatctcaattaactttgatttctttctttagaaaaccatgtgctgaaataatgctttgccagatgtgagaatggattccttcccctacaaacacacacttaagcttcattttagttctaatattttggtcttttttttattattcaaacttacactacatttttgtggctattggctttgtttgcagaagtaagcttactttatcttggagaaatactaatactttaaagttattgcttgtttgttattgttgcagccatttcctttttagtttgtaattttaaatttagcctgtttcttatatatataacctgttttcgccaatttctgatataaatcacacatttgttcatgtttctcatcatgggtgagccaaagctaacattacatagtgtgttattcccctgcgagccttggtcgagtctcaggcccaggaaggagagaggcagcagccatcagctctgtttcctgttctgagcctgtaaaacacactagccagtgccaccatgggaagggagtatctgttttgcaaaaattttttaataaggtctaatttttgtcttaattagcatgactaagtctatggtgctgattttactttgaaacccacatctatgtgtttagattccttgttttggccactcaattgtgactggaagagaaagccatgaatttcaggttccctaacatctaggatgccgtttctgtactgtcaacttctgtgtcactgcctcgtatcatttttggttgttgatgagtttgattttgctgtctattcaagatgacttttttcccttgtgcctgattctggttctctgtctggcctacctgactctttggtacattttgcattactgtttggacagcaggcttagtctttcccagggtgtcacagggctgtaattctacagatacttatggagtccaggatgggggcttttgctttagcacagacacctgaccaccactttgagagacagaggtttgagtttgttttgattcttcctccttgctgattctcagtgccgtgtgtctggcaaagaagtttgtgcacttgggaagctaaggaaaaaacttggtcctgggacaggtggaggatcgagcgacagagtagatgtggagttgggggtgattgtttcctaaaaattctgatccttctgggtggagaggaagctctccatctcagaagggctgcttctagggtgtgattactgatgggaagcacccttatttatgtaaaggtcatctcagagaaggggaagagggtgctaatttaaacacatgtcccaaaggaaaaaaatgtcacaaagggcatcatagggctgtgggggcaaggagaaggcagatggtaatacacaagtcattcccatcactaatcccctggttgatcatggccagctcattcaagattagctctagacctttctgggtctcagatttctcatttggagatgacaagtttggactggaagggtctgcgcagcccacactcccctgcctcccctgctctgcctccaaagttcttttctttttctttttttttaaataaaaatgtgtggcccaactagcctttgcttctcactagttgatgtcaatactgaggatgccaaaggactaatataaaaatgagcattcatgtggaattctttttgtctgttataagaaccaaaattggattgtatcacaacagctctgtgtcattgcagcacaagccatcatttaagtcgttgaaatttcccaaacttgccgttgctcattggctgtagaatataaacatagccattggctaaccacttgtttgacttaaaaccacgaaaaatgattgatccaacaatgacaaattgctatttcttctcaccaaatcatgcaaaagagcgaagatattaattgaaagtaaggggaaaaaagagcttgtcagtgatccagatattttaaacatcctgctgtttggaagcatctggatacttcacagctttttttttttttttttttttttttttggttcatttatcatccagatgctcaccatcatggaagcaccacttgaaactgtacttcggctaataacttagagtggaaacgtttgtatctttggttggttgccctttggtgctccattgatccctctgtcttcctctaagtccctcttccgcaaaatccccaggaatgtggcaattttgccagatgcttaggtgttggccttcagatttcttttttttaatcctcatgaccgctctgtaccctgtctgcttgaattatagattgcatttgtcaaatagtgacacatgcaattggatgtcttctaagacctttgaaattcaacttccttaagttgagattaaagtggatattctgctgccctgccacagtcaagcctgggatgcttcgagacctgcataaaagtttttctaggctggcatttctaactcttactgtcccgaggaaagaaaaacaagctacttttttcttctgaaaggtagaaatggagaccataaaaacgatctaaaatgtggtcccagttagaaaggactctgaaatcaacaactttttgaaacatgactgtctgttggagtgtcttgaattatgtgtttctttgggcattcaggaagccttatcagttgtgagtgaggaccagtcgttgtttgagtgtgcctacggaacgccacacctggctaagacagagatgaccgcgtcctcctccagcgactatggacagacttccaagatgagcccacgcgtccctcagcaggattggctgtctcaacccccagccagggtcaccatcaaaatggaatgtaaccctagccaggtgaatggctcaaggtaaggagacttccgcccctttctctccctgacctcccattttcctatcctttgcaaaggcaaagtggaagtcagtcatgcttctctaaagattgacttagaaagcaaggccactgtgcctgtaatcccagctactcgggagcctgaggcaggagaatcacttgaatccaggaggcagaggttgcagtgagccgggatcatgccactgcactccagcctgggcgacagagcaagactctggctaacaaaaaaaaaaaaaaaaaaagaagaagaaagaaagaaagaaaggccattgaacggtgacgttggacagcgctgggaaaatgtgttctccagtggtttgtgtagaggatggagtttgtaaaattagtagtatatttaccaagaactctctttgaagatgtgttcaattctatttcccaggcacgagggctctgtgggaggggagccttgcccacatatggcagaattcatctgaggtttgattgcctggaaaataatgccgtcttatgttttcacaaagggagagtgtcagctagtggccaggcagtgcggcgtatgtccaagccacttgaatttgctagtggatctccattgtctgccctccaccctcaccccaccctctgatctctgcggtcctcttctcttaatgcctgctgtttgttttttttttttttcctcctcttagcttacacataaagccctctccagtgtctcccataattattagcttccctgagtttgtcatgaacatacaactgtcacgtaaaatgtattaccaaatgcagaactgtccctggccctcaaaaagtgttgaattctgtgtagttttgaaaagtaaaattaatttcaattatgatctaataccccatatatattcaggaaaaagaatatcaaatcttaggataaagaacagattatttcttcgaaatgttgcataatctaccatcaggtcataagaacagctcacattttcggaaactttactgtgtacaaagcccttttatatccagtagcccctcagtcctccgagcagcccctcatgaagtatacttgaccccatttgatggatgaagaaacctgtgatcaggcatttccagtctgaccccaaatcaccacttaaatggaatcagagtttggatttaaaccaggagtgtttgactccacaccctgagcattttccactctgttgaagctgtaatggggcctttttgttacatatatgttttaacgctaaaaaggtttattataagtgtcatagtttataagtctggaaacggttgcgtcaattcctagtgtggtgttaatgaaggtgccaagtcacagtgtcctagagggaatgtcaacggcaaggctggacgtgccagatggggagatgggagatgccagaacactcctccactctgagaagtcagtttgcgtctgtgcatctgcttcttgaaagtgcactggctctgatgctacatattgccaccgcactggtcctttaagtggaactcgaggcaggcccatcttgaatctcatcaggagattcattcctggagttacagaaggacctgggtagaaaatgcaatgatgggtccaggacaccaaagttgtgggaaattaatgattacatgtaaatatttttgaatctcatcaagagattcattcctggagttacagaaggacctggatagaaaatgcaatgatgggtccaggacaccaaagttgtgggaaattaatgattacatgtaaatattttttacccataaatcctatgcatttgatacaatgtttctgttgatcattaactatatatatttctgaaacacagaagaatgcagggtaatcatgttctaaagaatgcagcagtgtttatgcagtagatcagttggtggaacacagcctggaaacactgaatgaattctgttttgggtggggtcatatgatcccatatatgccagcgtgatcacggcggagacactaagaccgggacacatttctaaagcttttcttctgcagaggctaatttctacctatgagcaattcacctgcagggaggagggggatgttggaaggtggggagagaggaaggaaacatctcagacaaaagggcactgagatgatttccgatggacaacaggcagagtgagccatgtcctggcccttgtttgagagtctggcctggggccagtctggattcagcaagcctccgaagggagactgagtgaggaggcgagaacagtgctccagaaatgaaagtttctattgttctcactgtgttactcccgaatttaaaataaaataagcattctggccgggcgcagtggctcacgcctgtaatcccagcactctgggaggccaaggcgggtggatcacgaggtcaagagatcgagaccatcctggctaacatggtgaaaccctgtctctactaaaaatacaaaaaattagccgggcgtggtggtgggcacctgtagtcccagctactcgggaggctgaggcaggagaatggcatgaacccgggaggcggagcttgcagtgagccgagatcgcgccactgcactccagcctgggcgacagagagaaactccatctcaaaaaaataaaaataaaaaataaaaaaataagcattctgtttgtgggagaagtgcaaacactgttttccttagtgtgagcctgtgatgccccttggtagctgatgtctcctctccctcctggccaggcatggggaagcttttccagcctgtgttgtgaccccaggggtacaggttgggagtttggggtaaccctgagccccaggcaaggggctacagtctataagaaagaaagacaccaggagcttcagtccataagaaagacaccagggcagttccgccccagggccctcagcgcagcagactggggaaagctcttgggtggtttttctgtcaggcaagtgaaaggctggtgctgcgctgagggtctctttccgggaaacatctttttcaggggaactggacattttctttcttttttatttttcttttagatggagttttgctcttttttacccaggctgcagggaagtggcacgatctcagcttactgcaacctccaccccccggggttcaagcgactcccctgcctcagcctcctgagtagctgggattacaggcatccgccaccatgcctggctaaattttgtatttttagtagagatggggtttcaccatgttggccaggctggtctcgaactcaatccacccatcttggcctctcagattgctgggattacaggtgttagccaccgcgcccggccttgacattttctttcaaggaaacaatgggaactttaagagttcctctctcagggctcatagaattctaacattgcccagattgctgccgtcataaactttcaatgctgttccagctcctaaagcatcggtgatgtgttttggtgggtggataccgagtgaagaccatcatgtcatcctcttcatcctccgggtcctccggtgggttcggtgatgtcggtttggcaggtgctgttcatgaagggaacaaggtggacctcatctgccttcaatccaggcctacgtgcctcctttgaggaaaagggcagctgggttgtaataggcaggggaggaacactggctgcagaggctgcctccgctttgaggcatctagcaatgtacagatgtcaaccagtcaccaagtgtcatcgtcccctacccacaaggatgttccagggggagggagaggagtggctgacactaatcccctttgtagaagagaaagatagagaaaggaaggacttagttcccaaccgaatagtggaattctacaaaacctcagtcctaacgtgcttacaagctcctgaaatgaaatacaagtggtgaaacgagatctgttgccattataatagagtttctgtaaagcataataaaagaaaaacaggagagaaaggaaccactgctttgcgagccaactgggatgtccttgtgggtttggcttggccactgccagatcaaacagcagcattcttgcagacagtaatctaattgcacgttgtgtagacacaggacatcatttttcagcttcggtggtccacagccaccctctccctttcttcactctagcctcacgcaccagaaagccccaagtgtacagagctcatgcccgtctcccccagagctcagtgtgtctcctggcattgtgtctgggtgctggcctggtgtatcagttgggattctctagagaaatagaacttataggatatttttacattttaagatatttatttgaaggaattggctaatgcagttgtgggagtgggcaggtctgagatctgcaggggaggctggcaggctggaaagtaggcagaatttcttctgctctggaaaccgcaggctttgttcttaaggccttcaactgattagacaaggcccactcacattatctgacatcatctcctttagtcaagttcaactgactagctacctgtgcaaatgccttcccagtacaacctcagttagcatttgattaagtcactgggtgctacggcctggccaagttgacacaggaaactgacccccacacctgacttccagggatgctgcactcatcagtgactggtgacccattgtactttttagatctccaaaccagtgtgctctggggggccagttcaccgctgctgctggagctcagcctgactggacagcgggtggtaaagggggtggcgtgtcaggtcagaggttcactagggggctgctcaagctcagtgatctgaaagaattgaaacataagtggtgagtcagtgttctgctattaacaatccaacgggcttcctgaaggggaatgggggaaaagaaagctgaacagttatcagtggagctaagactcatctcagccagaggttggaggcagccttggggcagacaaaggactgcctgggatcccatccgcaggctttgctgactcactgtgggcttttttttttttttttttttttttttgagacagttttgctcttgtcacccaggctggaatgcaatggcacaatctcggctcactgcaacctctgcctcccgagttcaagcgattctcctgcctcagcctcccgagtggctagttttcatatttttagcggagatggggcttcaccatgttgtccaggctggtctcgaactccttacctcaggtgatccacccgcctcagcctcccaaagtgctgggattacaagcgtgagccaccatgcccggcctcactatgggctctttacgaatgtcaggtgcagctccataaaagggaacatgggcgtgattcactctgctttattttggacaccgtgaaccagcaccgggctgtgtcagcccagctcgaggggccagggcagaggcagggttcacggagacgcagattctgccacggaggggctcacagatgagatgctgcagagcagtgtgtggctgcctgcctctggaggagccccgccaggagtgcagctcctcaacgctccactacctgcacctgcatccttccagactcggaagccccaggccagctgtgccagggagttagcccatctcctggcccctggcccaatagcttcttctaattgtccctcctcttagcttatgcataatgggctttcctgtagtgcacatgccacttgaagtcaagtccaaggggaagttacgtaagtcaaatattactctttggctagaacttgtgggctgttacctttgtggcccctgactatcttgcagacacctccacgggagaagtgcactctctgcagcttaggtctttccagaacatggcccacctccttctgcctagaatacccagcttgggaatagtgccctctgtccatccctatccatccagtacccacggagaaaaaggccatgtgctttgagagaaaggaaggacttagttcccaaccgaatagtggaattctacaaaacctcagtcctaacgtgcttacaagctcctgaaatgaaatacaagtggtgaaacgagatctgttgccattataatagagtttctgtaaagcataataaaagaaaaacaggagagaaaggaaccactgctttgcgagccaactgggatgtccttgtgggtttggcttggccactgccagatcaaacagcagcattcttgcagacagtaatctaattgcacgttgtgtagacacaggacatcatttttcagcttcggtggtccacagccaccctctccctttcttcactctagcctcacgcaccagaaagccccaagtgttcccggggtatgatttattgtaatctgtttggtaagccattccaaattcttttttttttttacttttggaaaaagtgggaggtatccattttttaaataattggaaatgtcctctttttttgttacagtgtttacatttgatttcatcagaaaggaaaatttttccttaccgtgagatgcttctgagttagactattatgttaataactaaattaactgatagaatgattatgcaacaacatcaaagactagtgaccaaatctgttatagctaattgccttttgtatttctggattttcagctgctcaaccatctccttccacagtgcccaaaactgaagaccagcgtcctcagttaggtatgtttcaggggccgtctggataaccataagagaagattcaggctcagcagcacatttctaaaatgcttcactttttaatggaaattaacatgattgtttgcctcttttcgacagctccatacataagatagggcccaagtcatcagcctactcatgcgaggtgacttgagatggtgctaaaacacgtccccaactatgcaataaatagggaaaaaaattctacgtgcacacaggctgcttctttgtgatccattaattttttagattttactttccatgcctaaacaacacagcctgcacggccctggattgatggggcttggcacatgtttgccctctttatatcattggttggtgtgagccttgagctatatgtcaggatcctggggttgaatccaagccctgccaccaattaggagtcccctagcaagacatctgagatgccgtgtgacatcttctctcatagaggaggtggaggcagttgatttggagttggaggacattttcggctctgaaatctgaaaaaacaattaagtcaggcattatgtctgaagtcacatcatactatgttacaactatgtctaggatttgactttgtttctttttgctgtagatccttatcagattcttggaccaacaagtagccgccttgcaaatccaggtgagaaactgctgatgattttcttcttacaaaattactttttggcagtggttattttgaaaagtaaattggtattggtgagaaattccttcaactgaacagattttagttttaggtctcactgaattatttgccttaatggaaagatgggttgggttataaattaagatttcagcttcagcaaagaacattataacctaatccaagctgtaatagttttctagggctgctgtaacaaagtaccacggattaggtggcttaaacaacaacagtttattgtctcgcagttctggaggctggaagtctgaaatcagagtgtcatggtggcaggtttcgttccttctcagggctgtgagggagggatctgtcctgggggctctccctggcttacagatagccatcatctcctcgtgtctcttctcatcatcatctctctgtgtgtgtcagtctctgtgtccaaatgcctcttttgcataaggacattggtcaggttggaatacctaccccataaccttactataacttgattacctcatttaggatcttatctccaaaaaaggtcacattcttagatactgcgggttaagatttcaacatagggaattgagggaacacaattcaacccattatacaagcagataaaataactagtattttttaaaagagagccttgatacaaccacaagacttcaaattcaggctcatcttcgatggtctgtttctgaacttcgatgctagaagaaagtgcagattcttaattagcccatttgtaaccagtgcattgccaaggtttgtcacctgtcctagtgtttcagtgccaaccacatagttttatttgtttgtattcagatcagaaccagctgtgctggcaccagcttcagaaattcatagcctatgctgcatattcccaactgcaaattcaaatgccaagatgttacaggcatattgcaagcacaagatggaatgtgtatttcctaaacgttgaggccaaaataaggttcgaaatggaataattaagatttaatcagtgtacatccctgcaagagaatctacacattgaaaacacgaaatgttatcattattgaacatctgtatttttgaagttaaattttggttaatgttaatgaattcaatgaattttttttacacagctgaaaatctaaagaaaactagttagcctggggcctagactaggtgctcaataattatttgttgcatacatgaatgccaaggataatgagatatagtcctttagctcagggtgcttttggtccgtggagagatggacacaggtagttacaacattgtcccaaacacagagccacaggccctttttgctcatgctggctttcatctagtagcccaggctcctgaggctgtggtctcttctcagccttctgctcagcttttcatttgcaactctgccatataaccattcaaataaaaataatgactatgttttgagatgattattatcagtcatgcttcaggaagactgatctggcagcaatgttcaggatagattagaaaaaagaaaatgacggaagctgaaacactctgggaatgttaatacaatcatgtgaaataacaatcaaacagctcccatcccgcagaatgccccccatagaatgtctgtggtcccttctgtgtctcataacagccctgggaggttactatctccatcctacagaaaaggaattagaagtccagagaagttaagtaacttttcctgtgtcacacagccaatgataagggaggtcaggttagaaacctgactctgtctgcaaagtctacttttgttttcttgccctactctgccactgactaagtatgaagggaagaggaggtcttacaaaatgcggactgtgagaatagaaagcaaggatttcctttcagggtcataactgcttaggtgcaggcgatgaatctgaggtcaggaaggaagaggaggaaagagtcaagctgcaccaaagaagaccaaactggcctttgcactcacacattggccaaatgaaacatatatgtccatgaccacgttgtcacagcccaaaggtactgcttggcttgtttgtagaatagggcctgagtcacttgctcctaagcaaagtgccagctttcacaagggaacactgcatatgccctgggcccagcagcccggggatgccctttgtagatagagggacctgagctcagagcaaggagaccggaaactcatcacaggcctggggaaggaggactgtgcttcataccattaagactgttcttaatgggcctggagaaaatggcaacatcccatctttgatttgcaggcaagtgactttaagataaagatttatttcatttagtttctgatgaatttgactttctctccatctatctttaggtttgtgtctgttgtgctcatgtgaacttttcccctgaaaccagaatgtcttttatctttgtattaatgacaatgcttcttcctgtttgattctatttttctattctctgataaataaatctttcatcacttaaaaattgctgtctttgctcttcatacaatacaaattccttttcatcattttaagtggaaagattgcatcatatagtatgaatgcacaggatgatgtcagcatcccaacatctctatcccaaatattcacttgatgtgtactttggacatcacttttcctgctgagaacagtgtgtccctgcattctgatatcatggatcggttataagcaacacagctcctttacatcccatcagagcagctgagaatctatctaacatggttcctctaatgaaagagctttggtgggttatgttcagaggcttccttgatgctaactggatactcttcaatggtgcacatgaaaatacatcctgcctcttgcagaacgacagaccaggctagggatgttttcccatttgttaggaggtggcagtgtgcagtcttccagtgggagtcccccagggaggggacaacatggaaaggacctgaggaggctacagaggtgtgcataaaccaggcctgaaagcaagtttgcgcagtgattaagcatggcagcctagagtctggatttcaacccttgccaacgctaagcaaaataagtcagtctacctctctaagctccaatttcgtcacttctccaatggactaatcacatgattcctgtggggattaaataaaccaatacatgtaaagcgtttagaatggtgcatggcacacagtaagctttcagaggatatcagtcagcccaagaatagcaccgtttcaagcttcttcatggttcaataggccaattgaacagtatttctctttctttaggcatttcctggctataggagaggagtgttatctttccttaaactctgattttcagcccaaagaaattctgacaagaccattcaagtactgagttcatccttaccatgatcttgcaagatagtactattaccatcacccccactttacagatgacgatactgaggcagagagagctgcgagagttgccaaacgtcccacaaagggcagaggcaggattcagctgaagcagtggcaactccaaagttggtgctccctaccaccatgctttcctgcccctccagtaagtggtgcctgagcctcactgagcctcggggcagagacttccattcaggacacacctgctggacacacctgctgccttgcagagggtccaggccatgcacacgggatcttctgcaccacccctggcttctagagaaagtggccccaaaccactgccacatggtactggtggggcccctcacggctgtatttactgcccttgttcatcagctgacggctgcagggctttgcaccaggatgctgtttccaccagacacagctgctgactcactctgcagctctctgctttgctctgtggtttgtaaaccgtttagtttttttttcccccttttttgctcagtctgtacccctttgctaccctgtttctctccctttcttttaacaatattaggagattactttcctctgtaaaattaaaggagtgcctctgtcttcttaaaagccacagccgctccctttcacccacagggttctctgtaggtggacaatgctgcttgccactgttttttacctccaaatatgttttattttggtaattaccctaagaaaaaattagttcctccttactgacatcgcaaggatgttattaagagagagtaaaaaaaaaaaatagatctgaagggtttacccaagaaaggtgagtcctaaggtagaggtggtgatgctactcaatgaaagctcttgtctttcaagaacttctctttgtaaatcctggtttggcccatgagtgacccaagccacttttaggctttcctaaaccctaagcattcttgtttggaaatctctattctatattctaaaatgcacctcgtcacacattaaatgttattgttttggaagtaaaataagaatttaaaaattgctcttaaaattttatgactgagaataattcctttaccactgacaattttttaacaaccattgttcatttttgagaattcttgcagtgagaaattttgttctacacactgcaaaatgcagcgaattttgttacaaatattaaatttaacaattaatgagtttgacatgatgttactctttctaccatttacttaaacattcattgattttgcatttccaggtttctttcaaggtttgaaagctgatgaattttgcttacagttctcttatttctatagaccctcccttgaaattctcacagtcctgagccctatgtctttatggctactgggtaaaatagtcaagtgagaaattagctcatccatcctttgggcatagagtttgctgccacaaatttaggtcccctgctttctaactcttcagaaataggagagacatgagatcacttttgtccactgattctgtcctacacacgtttataagagaaatgggtgagggacaaattgctaagaggcaatgccaaggtttgagtagattccaagtgtgatttcggcaggtctgtggagttgctttctctatgggagaaagttgacgctgaatatttattttcaaacaaccgtatgtgtttatattgaagcatctgttagactgttaaatcaaaaatccatgccttttcctattcccaggtcatatacggaattttttcaagttgtaattttttggttacaatatatatactaagaccatatggttttctcataccattctttgtattttctaaatgcatattaataaaatgttggaggcaacaaaacttgattgggaacagtttgtatatgtggttctgaaaaagcaaaggcttccacttcaatgagctacaagctgttaatacatttcaaatgtgttgctagactgaaaatgagcactttccagcatagattcagaaaaagctgacctttctcacagtgctattgtatggataaattcacaaaaatatccatgtccatgtagccaacatgcaaagcagagtttataagttgggtgatatgtacaggaggctagcgaggatttagaagaaaatgaacgtaaaattgatttttacagtatattacttccctgagtagatgtcagttaaagttactttaatcattttatcacatcgattgatattacttacactataataaaaggtaatcttttggtaataagtctaaggcagtgctgtaactggaatttgggaggaaagacccacctcccatctgttcttaagcttctgaaatatgttcagcacagcttagcttctcttggtacggatactgctgtcaatatttacatgctgctgtcttctagggagccataaactatcttcaagtattgtaacatagcagctagaatgatgtgcctagatttttctttgaatttcataaaacaaagctgtatctgtatgatttcaatgaaatcaagaaaattctgactttgtccacccagctaaatgtgatctctttgacaaaggaagagtctcattcagcttcccaaggggacttgcaatcactcattgttggggtttttcttctggaaatgctgcttaacacaattggcgttgcagcacacaggcaaggcactggtttccgttacgatgcgcttgcccaaatactggaactgggtgatctggtttgaaaaagagccagctttttttttttttttcctaaacttcctcattttgagtgggttaattctgttctaggaaaagttttcacagaattgctttctgagcgccagcaaaatgttatgttagaaataatggtgtttacttccattctcgatttttttccataaacttttagaagttcatttcctaaatctaacttttattatcttacttgacctagccaatataaatggcattaagtcattattgccatccacataacagtactttgtgcttcacaaaataggaaaaaaaaatatatagctctttcatcccctaaacaccaggttgatctggctgttcttttaaggacgtcagaaatggatggaagcagcctgaactttgccccatatgaattcgctgcattccatctaggtcttgaatctgttagatcatcgtcctaggtcgggttcccttgatgcagagcttggggtaagcctgcttgtgcaggtgactgattaacggcatgttctcaggagagagagaatgggaagtgctgcaggggcagcgctaaggaagtttctggcctcctccaagcctccttgcagctggacgctgtttcagcccaatcccacgggagccctgaagcctgaatagcgtcatggagttggtctttccttgaggcaagggggccggcccgtggtaccccgttcagtccacccagctgtgggatacctgggggtgggcgaggcggcggctctgttcaggcaagggcagttctctggagaagtgggtggccatggaacgagagcagtccgcacccctgcagctgagggatggacggacaggcctggtgaagggaatgtgggcggcacaccaatagcacctccttccgtcatcacagagagcctctttcccctggaacctgtgctcactggagttttccttcctctcctgacctcattaggcagtggccagatccagctttggcagttcctcctggagctcctgtcggacagctccaactccagctgcatcacctgggaaggcaccaacggggagttcaagatgacggatcccgacgaggtggcccggcgctggggagagcggaagagcaaacccaacatgaactacgataagctcagccgcgccctccgttactactatgacaagaacatcatgaccaaggtccatgggaagcgctacgcctacaagttcgacttccacgggatcgcccaggccctccagccccaccccccggagtcatctctgtacaagtacccctcagacctcccgtacatgggctcctatcacgcccacccacagaagatgaactttgtggcgccccaccctccagccctccccgtgacatcttccagtttttttgctgccccaaacccatactggaattcaccaactgggggtatataccccaacactaggctccccaccagccatatgccttctcatctgggcacttactactaaagacctggcggaggcttttcccatcagcgtgcattcaccagcccatcgccacaaactctatcggagaacatgaatcaaaagtgcctcaagaggaatgaaaaaagctttactggggctggggaaggaagccggggaagagatccaaagactcttgggagggagttactgaagtcttactacagaaatgaggaggatgctaaaaatgtcacgaatatggacatatcatctgtggactgaccttgtaaaagacagtgtatgtagaagcatgaagtcttaaggacaaagtgccaaagaaagtggtcttaagaaatgtataaactttagagtagagtttggaatcccactaatgcaaactgggatgaaactaaagcaatagaaacaacacagttttgacctaacataccgtttataatgccattttaaggaaaactacctgtatttaaaaatagaaacatatcaaaaacaagagaaaagacacgagagagactgtggcccatcaacagacgttgatatgcaactgcatggcatgtgctgttttggttgaaatcaaatacattccgtttgatggacagctgtcagctttctcaaactgtgaagatgacccaaagtttccaactcctttacagtattaccgggactatgaactaaaaggtgggactgaggatgtgtatagagtgagcgtgtgattgtagacagaggggtgaagaaggaggaggaagaggcagagaaggaggagaccagggctgggaaagaaacttctcaagcaatgaagactggactcaggacatttggggactgtgtacaatgagttatggagactcgagggttcatgcagtcagtgttataccaaacccagtgttaggagaaaggacacagcgtaatggagaaaggggaagtagtagaattcagaaacaaaaatgcgcatctctttctttgtttgtcaaatgaaaattttaactggaattgtctgatatttaagagaaacattcaggacctcatcattatgtgggggctttgttctccacagggtcaggtaagagatggccttcttggctgccacaatcagaaatcacgcaggcattttgggtaggcggcctccagttttcctttgagtcgcgaacgctgtgcgtttgtcagaatgaagtatacaagtcaatgtttttccccctttttatataataattatataacttatgcatttatacactacgagttgatctcggccagccaaagacacacgacaaaagagacaatcgatataatgtggccttgaattttaactctgtatgcttaatgtttacaatatgaagttattagttcttagaatgcagaatgtatgtaataaaataagcttggcctagcatggcaaatcagatttatacaggagtctgcatttgcactttttttagtgactaaagttgcttaatgaaaacatgtgctgaatgttgtggattttgtgttataatttactttgtccaggaacttgtgcaagggagagccaaggaaataggatgtttggcaccc

SEQ ID NO: 20 - protein, 176 aa, Homo sapiens; identical to SEQ ID NO: 17
  VARIANT (0)...(0): ERG_isoform 2_D6-12_distal ORF

SEQ ID NO: 21 - DNA, 20 bp, Homo sapiens
  misc_feature (0)...(0): junction of the intragenic deletion of exons 6-10 of the ERG_D6-10 cDNA (10 nucleotides 5' and 10 nucleotides 3' of the junction.)
atggctcaagctgctcaacc

SEQ ID NO: 22 - DNA, 20 bp, Homo sapiens
  misc_feature (0)...(0): junction of the intragenic deletion of exons 6-12 of ERG_D6-12 cDNA (10 nucleotides 5' and 10 nucleotides 3' of the junction.)
atggctcaaggcagtggcca

SEQ ID NO: 23 - DNA, 15 bp, Homo sapiens
cagaaagccccaagt

SEQ ID NO: 24 - DNA, 16 bp, Homo sapiens
cagaaagccccaagtg

SEQ ID NO: 25 - DNA, 18 bp, Homo sapiens
cagaaagccccaagtgtt

SEQ ID NO: 26 - DNA, 30 bp, Homo sapiens
cagaaagccccaagtgttcacacaatggag

SEQ ID NO: 27 - DNA, 7 bp, Homo sapiens
cccgggg

SEQ ID NO: 28 - DNA, 5 bp, Homo sapiens
tatga

SEQ ID NO: 29 - DNA, 18 bp, Homo sapiens
gtttatcttagactatga

SEQ ID NO: 30 - DNA, 38 bp, Homo sapiens
cctttatgtgtttatcttagactatgatttattgtaat

SEQ ID NO: 31 - DNA, 7 bp, Homo sapiens
tcctaaa

SEQ ID NO: 32 - DNA, 31 bp, Homo sapiens
caagcacaagatggaatgtgtatttcctaaa
